(19) United States
(12) Patent Application Publication
(10) Pub. No.: US 2016/0249542 A1
(43) Pub. Date: Sep. 1, 2016

(54) SELF-REPRODUCING HYBRID PLANTS

(71) Applicant: PIONEER HI-BRED INTERNATIONAL INC., Johnston, IA (US)

(72) Inventors: SHAI JOSHUA LAWIT, URBANDALE, IA (US); MARTA CIFUENTES OCHOA, WEST MOINES, IA (US); MARISSA KATHARINE SIMON, GRIMES, IA (US)

(21) Appl. No.: 15/030,471

(22) PCT Filed: Oct. 28, 2014
(86) PCT No.: PCT/US2014/062633

§ 371 Date: Apr. 19, 2016

Related U.S. Application Data
(60) Provisional application No. 61/897,058, filed on Oct. 29, 2013.

(51) Int. Cl. A01H 1/02

(52) U.S. Cl. CPC A01H 1/02

(57) ABSTRACT

Compositions and methods for the production of self-reproducing hybrid plants are provided. Compositions include suppression cassettes encoding polynucleotides and promoters that result in the MiMe clonal diploid gamete phenotype compositions and suppression cassettes and expression cassettes useful for genome elimination of a parental diploid gamete in a fertilized zygote. The methods involve crossing a first plant comprising a first suppression cassette responsible for producing the MiMe clonal diploid gamete phenotype and a first expression cassette expressing an active CENH3 mutant with a second plant comprising a second suppression cassette that reduces the level of wild-type CENH3 and a second expression cassette comprising a polynucleotide expressing CENH3 specifically in the ovule. Self fertilization of the resultant progeny plant results in the elimination of the male diploid genome in the zygote and normal development of the endosperm. Additionally provided are plants and seeds produced by the methods of the invention.

### FIELD OF THE INVENTION

[0001] The invention relates to the field of genetic manipulation of plants, particularly the production of self-reproducing hybrid plants.

### BACKGROUND OF THE INVENTION

[0002] Although plant breeding programs worldwide have made considerable progress developing new cultivars with improved disease resistances, yields and other useful traits, breeding as a whole relies on screening numerous plants to identify novel, desirable characteristics. Very large numbers of progeny from crosses often must be grown and evaluated over several years in order to select one or a few plants with a desired combination of traits.

[0003] A continuing goal of plant breeders is to develop stable, high-yielding varieties that are agronomically sound. Standard breeding of diploid plants often requires screening and back-crossing of a large number of plants to achieve the desired genotype. One solution to the problem of screening large numbers of progeny has been to generate doubled haploid plants that eliminate genomic heterogeneity and, thus, any segregation of traits. When economically and biologically feasible, additional gains are often made through employing heterosis with hybrids of two inbred parents.

[0004] Heterosis studies in soybean estimate that there is approximately a 10% yield improvement potential with hybrids. However, hybrid soybeans have never been developed because pollen flow from male to female inbreds is very poor. Pollen vectoring is a problem that has few, if any, solutions available for high volume hybrid production in soybean. However, hand crosses could produce limited hybrid numbers and volume production of hybrid soybean could commence with the aid of self-reproduction.

[0005] Furthermore, current transgene introgression requires the maintenance of transgene homozygosity in inbred lines and varieties, which greatly limits the potential for native and transgene trait stacking. However, by using hybrid plants, transgenes could be stacked much more easily by providing a single copy from each parent. Availability of a system to generate self-reproducing hybrids would find value in both plant breeding and development.

[0006] Thus, marked improvements in the economics of breeding can be achieved via self-reproducing hybrid production, since selection and other procedural efficiencies can be substantially improved. Current methods for parent-specific genome elimination result in plants with near total male sterility and very low rates of female fecundity, making propagation of the hybrid plant difficult.

### BRIEF SUMMARY OF THE INVENTION

[0007] Compositions and methods for the production of self-reproducing hybrid plants are provided. Compositions include suppression cassettes encoding polynucleotides and promoters that result in the MiMe diploid clonal gamete phenotype. Further provided are methods and compositions comprising suppression cassettes and expression cassettes resulting in genome elimination of a parental diploid gamete in the fertilized zygote, producing a self-reproducing hybrid plant.

[0008] Methods for producing a self-reproducing hybrid plant include crossing a first plant comprising a first suppression cassette responsible for producing the MiMe diploid clonal gamete phenotype and a first expression cassette expressing an active CENH3 mutant with a second plant comprising a second suppression cassette that reduces the level of wild-type CENH3 and a second expression cassette comprising a polynucleotide expressing CENH3 specifically in the ovule. Self fertilization of the resultant progeny plant results in the elimination of the male diploid genome in the zygote and normal development of the endosperm. Additionally provided are plants and seeds, particularly hybrid plants and hybrid seeds, produced by the methods of the invention.

### BRIEF DESCRIPTION OF THE DRAWINGS

[0009] FIG. 1 shows a transgene system designed to activate clonal reproduction in hybrids using female genome elimination in the zygote, but maintain normal sexual reproduction in the parental inbred varieties. Upon hybrid creation through crossing of the two parent lines, Transactivator B (for example) drives constitutive suppression of Meiosis genes leading to unreduced clonal gametes. Transactivator A (for example) drives suppression of CENH3 in the ovule, setting the stage for the CENH3 GFP-tailswap expression. An ovule promoter drives expression of the CENH3 GFP-tailswap in the ovule leading to female genome elimination in the first zygotic mitosis. A central cell promoter drives the WT CENH3 in the central cell allowing normal mitosis in the endosperm, and preventing female genome elimination in the endosperm.

[0010] FIG. 2 shows an example of the transgene system designed to activate clonal reproduction in hybrids using female genome elimination in the embryo, but maintain normal sexual reproduction in the parental inbred varieties. T7 polymerase and GaI4DBD-VP16 (or LexA-CBF) two component activation systems are shown as examples of possible transactivators that would activate the self reproduction system only once brought together in a hybrid cross containing the two transgene cassettes where the amiRNA silencing elements would be activated. Specifically, T7 polymerase (for example) drives constitutive suppression of Meiosis (MiMe) genes leading to unreduced clonal gametes. GaI4DBD-VP16 (for example) drives suppression of CENH3 in the ovule, setting the stage for the CENH3 GFP-tailswap expression. An ovule promoter drives expression of the CENH3 GFP-tailswap leading to female genome elimination in the first zygotic mitosis.AT-DD65 PRO drives the WT CENH3 in the central cell allowing normal mitosis in the endosperm and preventing female genome elimination in the endosperm.

[0011] FIG. 3 shows the mechanisms utilized to result in self-reproducing hybrid plants using female genome elimination. For example, an apomeiosis system (e.g. MiMe) produces unreduced gametes. Expression of genome elimination technology occurs in the egg cell. Fertilization leads to a 4n zygote and 6n endosperm (4m:2p). Genome elimination of the egg cell genome in the zygote leads to a 2n (paternal genome) zygote/embryo. Normal endosperm develops from a 4m:2p genome which has the proper 2m:1p genome ratio.

[0012] FIG. 4 shows (Left) quadruply labeled embryo sac in an ovule from Arabidopsis transgenic PHP47078 at the egg cell stage of development. These labeled embryo sac cells allow cell development and viability to be monitored. (Right) Triply labeled embryo sac in an ovule from Arabidopsis transgenic PHP42551. This embryo sac is at the early embryo stage of development prior to the globular stage. Numerous endosperm nuclei are visible in cyan demonstrating the ability to follow early endosperm development.

[0013] FIG. 5 shows an example of the transgene system designed to activate clonal reproduction in hybrids using male genome elimination in the embryo, but maintain normal sexual reproduction in the parental inbred varieties. Two component activation (transactivator) systems are shown as examples of possible transactivators that would activate the self reproduction system only once brought together in a hybrid cross containing the two transgene cassettes where the amiRNA silencing elements would be activated. Upon hybrid creation through crossing of the two parent lines, Transactivator B drives constitutive suppression of Meiosis (MiMe) genes leading to unreduced clonal gametes. Transactivator A drives suppression of CENH3 in the cells undergoing meiosis and through a few subsequent mitotic divisions, setting the stage for the CENH3 GFP-tailswap expression. An egg cell promoter drives the WT CENH3 in the egg cell enabling male genome elimination in the first zygotic mitosis. A pollen or sperm cell promoter drives expression of the CENH3 GFP-tailswap in the sperm cell leading to male genome elimination in the first zygotic mitosis. A central cell promoter drives the CENH3 GFP-tailswap in the central cell allowing normal mitosis in the endosperm, and preventing female genome elimination in the endosperm (no CENH3 parental conflict).

[0014] FIG. 6 shows an example of the transgene system designed to activate clonal reproduction in hybrids using female genome elimination in the embryo, but maintain normal sexual reproduction in the parental inbred varieties. Transactivator A drives constitutive suppression of Meiosis (MiMe) genes leading to unreduced clonal gametes. tetR(for example) represses the native CENH3 in the female germline, setting the stage for the CENH3 GFP-tailswap expression. For this to occur the CENH3 native promoter must be modified through homologous recombination or another targeted gene replacement technology. Alternatively, the native CENH3 may be knocked-out or silenced, and a transgenic copy of the CENH3 is controlled by a controllable repressor. An egg cell promoter drives expression of the CENH3 GFP-tailswap in the egg cell leading to female genome elimination in the first zygotic mitosis. A central cell promoter drives the WT CENH3 in the central cell allowing normal mitosis in the endosperm, and preventing female genome elimination in the endosperm. Following the F1 production from the two parent lines, the two-component transcriptional activator and repressor system are brought into a common hybrid genome and activate the silencing elements and/or repress the genes required for MiMe and genome elimination.

[0015] FIG. 7 shows an example of the transgene system designed to activate clonal reproduction in hybrids using male genome elimination in the embryo, but maintain normal sexual reproduction in the parental inbred varieties. Transactivator A drives constitutive suppression of Meiosis (MiMe) genes leading to unreduced clonal gametes. tetR (for example) represses expression of the native CENH3 in the cells undergoing meiosis and through a few subsequent mitotic divisions, setting the stage for the CENH3 GFP-tailswap expression. For this to occur, the CENH3 native promoter must be modified through homologous recombination or another targeted gene replacement technology. Alternatively, the native CENH3 may be knocked-out or silenced, and a transgenic copy of the CENH3 is controlled by a controllable repressor. An egg cell promoter drives the WT CENH3 in the egg cell enabling male genome elimination in the first zygotic mitosis. A pollen or sperm cell promoter drives expression of the CENH3 GFP-tailswap in the sperm cell leading to male genome elimination in the first zygotic mitosis. A central cell promoter drives the CENH3 GFP-tailswap in the central cell allowing normal mitosis in the endosperm, and preventing female genome elimination in the endosperm (no CENH3 parental conflict). Following the F1 production from the two parent lines, the two-component transcriptional activators are brought into a common hybrid genome and activate the silencing elements required for MiMe and genome elimination.

[0016] FIG. 8 shows the mechanisms utilized to result in self-reproducing hybrid plants using male genome elimination. For example, an apomeiosis system (e.g. MiMe) produces unreduced clonal gametes. Expression of genome elimination technology occurs in the central cell and sperm cells. Fertilization leads to a 4n zygote and 6n endosperm (4m:2p). Genome elimination of the sperm cell genome in the zygote leads to a 2n (maternal genome) zygote/embryo. Normal endosperm develops from a 4m:2p genome which has the proper 2m:1p genome ratio

[0017] FIG. 9 shows a DAPI stained chromosome spread of a first (A) and second meiotic division in male meiocytes from Arabidopsis amiRNA construct targeting PRD3 (PHP73406). Univalents segregate randomly due to the lack of double strand breaks.

[0018] FIG. 10 shows a DAPI stained chromosome spread of a first (A) and second (B) meiotic division in male meiocytes from Arabidopsis amiRNA construct targeting REC8 (PHP72993). Fragmentation of chromosomes occurs during meiosis leading to unviable gametes.

[0019] FIG. 11 shows the ploidy content of a wild type (diploid) soy plant and the tetraploid offspring of an amiRNA construct targeting OSD1 which produced diploid gametes in both male and female organs in soy.

[0020] FIG. 12 (left) shows the DNA content (ploidy) of nuclei from a haploid Arabidopsis plant generated from the cross of pollen from a plant expressing suppression sequences no. 279 and 280 (a CENH3 amiRNA) in combination with expression of an active CENH3 tailswap polypeptide onto a WT female plant. (Center) Shows the DNA content (ploidy) of nuclei a WT diploid Arabidopsis plant. (Right) Shows the DNA content (ploidy) of nuclei from a tetraploid T2 plant expressing an Osd1 amiRNA.

### DETAILED DESCRIPTION OF THE INVENTION

[0021] The present inventions now will be described more fully hereinafter with reference to the accompanying drawings, in which some, but not all embodiments of the inventions are shown. Indeed, these inventions may be embodied in many different forms and should not be construed as limited to the embodiments set forth herein; rather, these embodiments are provided so that this disclosure will satisfy applicable legal requirements. Like numbers refer to like elements throughout.

[0022] Many modifications and other embodiments of the inventions set forth herein will come to mind to one skilled in the art to which these inventions pertain having the benefit of the teachings presented in the foregoing descriptions and the associated drawings. Therefore, it is to be understood that the inventions are not to be limited to the specific embodiments disclosed and that modifications and other embodiments are intended to be included within the scope of the appended claims. Although specific terms are employed herein, they are used in a generic and descriptive sense only and not for purposes of limitation.

TABLE 1

| | | | POLYNUCLEOTIDE/ |
|---|---|---|---|
| SEQ ID. | ORGANISM NAME | DESCRIPTION | POLYPEPTIDE (PN/PP) |
| SEQ ID NO: 1 | ARTIFICIAL SEQUENCE | CONSERVED | PP |
| | | DOMAIN | |
| SEQ ID NO: 2 | ARABIDOPSIS THALIANA | SPO11-1 | PN |
| SEQ ID NO: 3 | ARABIDOPSIS THALIANA | 3ISD | PN |
| SEQ ID NO: 4 | ARABIDOPSIS THALIANA | REC8 | PN |
| SEQ ID NO: 5 | ARABIDOPSIS THALIANA | CENH3 | PN |
| SEQ ID NO: 6 | ARTIFICIAL SEQUENCE | PRIMER | PN |
| SEQ ID NO: 7 | ARTIFICIAL SEQUENCE | PRIMER | PN |
| SEQ ID NO: 8 | ARTIFICIAL SEQUENCE | PRIMER | PN |
| SEQ ID NO: 9 | ARTIFICIAL SEQUENCE | PRIMER | PN |
| SEQ ID NO: 10 | ARTIFICIAL SEQUENCE | PRIMER | PN |
| SEQ ID NO: 11 | ARTIFICIAL SEQUENCE | PRIMER | PN |
| SEQ ID NO: 12 | ARTIFICIAL SEQUENCE | PRIMER | PN |
| SEQ ID NO: 13 | BRASSICA NAPUS | CENH3 | PN |
| SEQ ID NO: 14 | BRASSICA RAPA | CENH3 | PN |
| SEQ ID NO: 15 | BRASSICA RAPA | CENH3 | PP |
| SEQ ID NO: 16 | GLYCINE MAX | CENH3 | PN |
| SEQ ID NO: 17 | GLYCINE MAX | CENH3 | PN |
| SEQ ID NO: 18 | MEDICAGO TRUNCATULA | CENH3 | PN |
| SEQ ID NO: 19 | MEDICAGO TRUNCATULA | CENH3 | PP |
| SEQ ID NO: 20 | ORYZA SATIVA | CENH3 | PN |
| SEQ ID NO: 21 | ORYZA SATIVA | CENH3 | PP |
| SEQ ID NO: 22 | ORYZA SATIVA | CENH3 | PN |
| SEQ ID NO: 23 | ORYZA SATIVA | CENH3 | PP |
| SEQ ID NO: 24 | SETARIA ITALICA | CENH3 | PN |
| SEQ ID NO: 25 | SETARIA ITALICA | CENH3 | PP |
| SEQ ID NO: 26 | SORGHUM BICOLOR | CENH3 | PN |
| SEQ ID NO: 27 | SORGHUM BICOLOR | CENH3 | PP |
| SEQ ID NO: 28 | VITIS VINIFERA | CENH3 | PN |
| SEQ ID NO: 29 | VITIS VINIFERA | CENH3 | PP |
| SEQ ID NO: 30 | ZEA MAYS | CENH3 | PN |
| SEQ ID NO: 31 | ZEA MAYS | CENH3 | PP |
| SEQ ID NO: 32 | BRASSICA NAPUS | OSD1 | PN |
| SEQ ID NO: 33 | BRASSICA RAPA | OSD1 | PN |
| SEQ ID NO: 34 | BRASSICA RAPA | OSD1 | PP |
| SEQ ID NO: 35 | BRASSICA RAPA | OSD1 | PN |
| SEQ ID NO: 36 | BRASSICA RAPA | OSD1 | PP |
| SEQ ID NO: 37 | GLYCINE MAX | OSD1 | PN |
| SEQ ID NO: 38 | GLYCINE MAX | OSD1 | PP |
| SEQ ID NO: 39 | GLYCINE MAX | OSD1 | PN |
| SEQ ID NO: 40 | GLYCINE MAX | OSD1 | PP |
| SEQ ID NO: 41 | MEDICAGO TRUNCATULA | OSD1 | PN |
| SEQ ID NO: 42 | MEDICAGO TRUNCATULA | OSD1 | PP |
| SEQ ID NO: 43 | ORYZA SATIVA | OSD1 | PN |
| SEQ ID NO: 44 | ORYZA SATIVA | OSD1 | PP |
| SEQ ID NO: 45 | ORYZA SATIVA | OSD1 | PN |
| SEQ ID NO: 46 | ORYZA SATIVA | OSD1 | PP |
| SEQ ID NO: 47 | SORGHUM BICOLOR | OSD1 | PN |
| SEQ ID NO: 48 | SORGHUM BICOLOR | OSD1 | PP |
| SEQ ID NO: 49 | VITIS VINIFERA | OSD1 | PN |
| SEQ ID NO: 50 | VITIS VINIFERA | OSD1 | PP |
| SEQ ID NO: 51 | ZEA MAYS | OSD1 | PN |
| SEQ ID NO: 52 | ZEA MAYS | OSD1 | PP |
| SEQ ID NO: 53 | BRASSICA NAPUS | SPO11-1 | PN |
| SEQ ID NO: 54 | BRASSICA NAPUS | SPO11-1 | PP |
| SEQ ID NO: 55 | BRASSICA RAPA | SPO11-1 | PN |
| SEQ ID NO: 56 | BRASSICA RAPA | SPO11-1 | PP |
| SEQ ID NO: 57 | GLYCINE MAX | SPO11-1 | PN |
| SEQ ID NO: 58 | GLYCINE MAX | SPO11-1 | PP |
| SEQ ID NO: 59 | GLYCINE MAX | SPO11-1 | PN |
| SEQ ID NO: 60 | GLYCINE MAX | SPO11-1 | PP |
| SEQ ID NO: 61 | GLYCINE MAX | SPO11-1 | PN |
| SEQ ID NO: 62 | GLYCINE MAX | SPO11-1 | PP |
| SEQ ID NO: 63 | MEDICAGO TRUNCATULA | SPO11-1 | PN |
| SEQ ID NO: 64 | MEDICAGO TRUNCATULA | SPO11-1 | PP |
| SEQ ID NO: 65 | ORYZA SATIVA | SPO11-1 | PN |
| SEQ ID NO: 66 | ORYZA SATIVA | SPO11-1 | PP |
| SEQ ID NO: 67 | SETARIA ITALICA | SPO11-1 | PN |
| SEQ ID NO: 68 | SETARIA ITALICA | SPO11-1 | PP |
| SEQ ID NO: 69 | SORGHUM BICOLOR | SPO11-1 | PN |
| SEQ ID NO: 70 | SORGHUM BICOLOR | SPO11-1 | PP |
| SEQ ID NO: 71 | VITIS VINIFERA | SPO11-1 | PN |
| SEQ ID NO: 72 | VITIS VINIFERA | SPO11-1 | PP |
| SEQ ID NO: 73 | ZEA MAYS | SPO11-1 | PN |
| SEQ ID NO: 74 | ZEA MAYS | SPO11-1 | PP |
| SEQ ID NO: 75 | BRASSICA NAPUS | REC8 | PN |
| SEQ ID NO: 76 | BRASSICA RAPA | REC8 | PN |
| SEQ ID NO: 77 | BRASSICA RAPA | REC8 | PP |
| SEQ ID NO: 78 | GLYCINE MAX | REC8 | PN |
| SEQ ID NO: 79 | GLYCINE MAX | REC8 | PP |
| SEQ ID NO: 80 | GLYCINE MAX | REC8 | PN |
| SEQ ID NO: 81 | GLYCINE MAX | REC8 | PP |
| SEQ ID NO: 82 | MEDICAGO TRUNCATULA | REC8 | PN |
| SEQ ID NO: 83 | MEDICAGO TRUNCATULA | REC8 | PP |
| SEQ ID NO: 84 | MEDICAGO TRUNCATULA | REC8 | PN |
| SEQ ID NO: 85 | MEDICAGO TRUNCATULA | REC8 | PP |
| SEQ ID NO: 86 | ORYZA SATIVA | REC8 | PN |
| SEQ ID NO: 87 | ORYZA SATIVA | REC8 | PP |
| SEQ ID NO: 88 | SETARIA ITALICA | REC8 | PN |
| SEQ ID NO: 89 | SETARIA ITALICA | REC8 | PP |
| SEQ ID NO: 90 | SORGHUM BICOLOR | REC8 | PN |
| SEQ ID NO: 91 | SORGHUM BICOLOR | REC8 | PP |
| SEQ ID NO: 92 | VITIS VINIFERA | REC8 | PN |
| SEQ ID NO: 93 | VITIS VINIFERA | REC8 | PP |
| SEQ ID NO: 94 | ZEA MAYS | REC8 | PN |
| SEQ ID NO: 95 | ZEA MAYS | REC8 | PP |
| SEQ ID NO: 96 | BRASSICA NAPUS | CENP-C | PN |
| SEQ ID NO: 97 | BRASSICA NAPUS | CENP-C | PP |
| SEQ ID NO: 98 | BRASSICA NAPUS | CENP-C | PN |
| SEQ ID NO: 99 | BRASSICA NAPUS | CENP-C | PP |
| SEQ ID NO: 100 | BRASSICA RAPA | CENP-C | PN |
| SEQ ID NO: 101 | BRASSICA RAPA | CENP-C | PP |
| SEQ ID NO: 102 | BRASSICA RAPA | CENP-C | PN |
| SEQ ID NO: 103 | GLYCINE MAX | CENP-C | PN |
| SEQ ID NO: 104 | GLYCINE MAX | CENP-C | PP |
| SEQ ID NO: 105 | GLYCINE MAX | CENP-C | PN |
| SEQ ID NO: 106 | GLYCINE MAX | CENP-C | PP |
| SEQ ID NO: 107 | MEDICAGO TRUNCATULA | CENP-C | PN |
| SEQ ID NO: 108 | MEDICAGO TRUNCATULA | CENP-C | PP |
| SEQ ID NO: 109 | ORYZA SATIVA | CENP-C | PN |
| SEQ ID NO: 110 | ORYZA SATIVA | CENP-C | PP |
| SEQ ID NO: 111 | SETARIA ITALICA | CENP-C | PN |
| SEQ ID NO: 112 | SETARIA ITALICA | CENP-C | PP |
| SEQ ID NO: 113 | SORGHUM BICOLOR | CENP-C | PN |
| SEQ ID NO: 114 | SORGHUM BICOLOR | CENP-C | PP |
| SEQ ID NO: 115 | ZEA MAYS | CENP-C | PN |
| SEQ ID NO: 116 | ZEA MAYS | CENP-C | PP |
| SEQ ID NO: 117 | ZEA MAYS | CENP-C | PN |
| SEQ ID NO: 118 | ZEA MAYS | CENP-C | PP |
| SEQ ID NO: 119 | ZEA MAYS | CENP-C | PN |
| SEQ ID NO: 120 | ZEA MAYS | CENP-C | PP |
| SEQ ID NO: 121 | BRASSICA NAPUS | MIS12 | PN |
| SEQ ID NO: 122 | BRASSICA NAPUS | MIS12 | PN |
| SEQ ID NO: 123 | BRASSICA NAPUS | MIS12 | PP |
| SEQ ID NO: 124 | BRASSICA RAPA | MIS12 | PN |
| SEQ ID NO: 125 | BRASSICA RAPA | MIS12 | PP |
| SEQ ID NO: 126 | GLYCINE MAX | MIS12 | PN |
| SEQ ID NO: 127 | GLYCINE MAX | MIS12 | PP |
| SEQ ID NO: 128 | GLYCINE MA | MIS12 | PN |
| SEQ ID NO: 129 | GLYCINE MAX | MIS12 | PP |
| SEQ ID NO: 130 | MEDICAGO TRUNCATULA | MIS12 | PN |
| SEQ ID NO: 131 | MEDICAGO TRUNCATULA | MIS12 | PP |
| SEQ ID NO: 132 | MEDICAGO TRUNCATULA | MIS12 | PN |
| SEQ ID NO: 133 | MEDICAGO TRUNCATULA | MIS12 | PP |
| SEQ ID NO: 134 | ORYZA SATIVA | MIS12 | PN |
| SEQ ID NO: 135 | ORYZA SATIVA | MIS12 | PP |
| SEQ ID NO: 136 | SORGHUM BICOLOR | MIS12 | PN |
| SEQ ID NO: 137 | SORGHUM BICOLOR | MIS12 | PP |
| SEQ ID NO: 138 | VITIS VINIFERA | MIS12 | PN |
| SEQ ID NO: 139 | VITIS VINIFERA | MIS12 | PP |
| SEQ ID NO: 140 | ZEA MAYS | MIS12 | PN |
| SEQ ID NO: 141 | ZEA MAYS | MIS12 | PP |
| SEQ ID NO: 142 | ZEA MAYS | MIS12 | PN |
| SEQ ID NO: 143 | ZEA MAYS | MIS12 | PP |
| SEQ ID NO: 144 | BRASSICA NAPUS | NUF2 | PN |
| SEQ ID NO: 145 | BRASSICA NAPUS | NUF2 | PP |
| SEQ ID NO: 146 | BRASSOCA NAPUS | NUF2 | PN |
| SEQ ID NO: 147 | BRASSICA RAPA | NUF2 | PN |
| SEQ ID NO: 148 | BRASSICA RAPA | NUF2 | PP |
| SEQ ID NO: 149 | GLYCINE MAX | NUF2 | PN |
| SEQ ID NO: 150 | GLYCINE MAX | NUF2 | PP |
| SEQ ID NO: 151 | MEDICAGO TRUNCATULA | NUF2 | PN |
| SEQ ID NO: 152 | MEDICAGO TRUNCATULA | NUF2 | PP |
| SEQ ID NO: 153 | MEDICAGO TRUNCATULA | NUF2 | PN |
| SEQ ID NO: 154 | MEDICAGO TRUNCATULA | NUF2 | PP |
| SEQ ID NO: 155 | ORYZA SATIVA | NUF2 | PN |
| SEQ ID NO: 156 | ORYZA SATIVA | NUF2 | PP |
| SEQ ID NO: 157 | ORYZA SATIVA | NUF2 | PN |
| SEQ ID NO: 158 | ORYZA SATIVA | NUF2 | PP |
| SEQ ID NO: 159 | SETARIA ITALICA | NUF2 | PN |
| SEQ ID NO: 160 | SETARIA ITALICA | NUF2 | PP |
| SEQ ID NO: 161 | SORGHUM BICOLOR | NUF2 | PN |
| SEQ ID NO: 162 | SORGHUM BICOLOR | NUF2 | PP |
| SEQ ID NO: 163 | SORGHUM BICOLOR | NUF2 | PN |
| SEQ ID NO: 164 | SORGHUM BICOLOR | NUF2 | PP |
| SEQ ID NO: 165 | SORGHUM BICOLOR | NUF2 | PN |
| SEQ ID NO: 166 | SORGHUM BICOLOR | NUF2 | PP |
| SEQ ID NO: 167 | VITIS VINIFERA | NUF2 | PN |
| SEQ ID NO: 168 | VITIS VINIFERA | NUF2 | PP |
| SEQ ID NO: 169 | VITIS VINIFERA | NUF2 | PN |
| SEQ ID NO: 170 | VITIS VINIFERA | NUF2 | PP |
| SEQ ID NO: 171 | ZEA MAYS | NUF2 | PN |
| SEQ ID NO: 172 | ZEA MAYS | NUF2 | PP |
| SEQ ID NO: 173 | ZEA MAYS | NUF2 | PN |
| SEQ ID NO: 174 | ZEA MAYS | NUF2 | PP |
| SEQ ID NO: 175 | BRASSICA NAPUS | PRD1 | PN |
| SEQ ID NO: 176 | BRASSICA RAPA | PRD1 | PN |
| SEQ ID NO: 177 | BRASSICA RAPA | PRD1 | PP |
| SEQ ID NO: 178 | GLYCINE MAX | PRD1 | PN |
| SEQ ID NO: 179 | GLYCINE MAX | PRD1 | PP |
| SEQ ID NO: 180 | GLYCINE MAX | PRD1 | PN |
| SEQ ID NO: 181 | GLYCINE MAX | PRD1 | PP |
| SEQ ID NO: 182 | MEDICAGO TRUNCATULA | PRD1 | PN |
| SEQ ID NO: 183 | MEDICAGO TRUNCATULA | PRD1 | PP |
| SEQ ID NO: 184 | ORYZA SATIVA | PRD1 | PN |
| SEQ ID NO: 185 | ORYZA SATIVA | PRD1 | PP |
| SEQ ID NO: 186 | SETARIA ITALICA | PRD1 | PN |
| SEQ ID NO: 187 | SETARIA ITALICA | PRD1 | PP |
| SEQ ID NO: 188 | SORGHUM BICOLOR | PRD1 | PN |
| SEQ ID NO: 189 | SORGHUM BICOLOR | PRD1 | PP |
| SEQ ID NO: 190 | VITIS VINIFERA | PRD1 | PN |
| SEQ ID NO: 191 | VITIS VINIFERA | PRD1 | PP |
| SEQ ID NO: 192 | ZEA MAYS | PRD1 | PN |
| SEQ ID NO: 193 | ZEA MAYS | PRD1 | PP |
| SEQ ID NO: 194 | BRASSICA NAPUS | PRD2 | PN |
| SEQ ID NO: 195 | BRASSICA RAPA | PRD2 | PN |
| SEQ ID NO: 196 | BRASSICA RAPA | PRD2 | PP |
| SEQ ID NO: 197 | BRASSICA RAPA | PRD2 | PN |
| SEQ ID NO: 198 | BRASSICA RAPA | PRD2 | PP |
| SEQ ID NO: 199 | GLYCINE MAX | PRD2 | PN |
| SEQ ID NO: 200 | GLYCINE MAX | PRD2 | PP |
| SEQ ID NO: 201 | GLYCINE MAX | PRD2 | PN |
| SEQ ID NO: 202 | GLYCINE MAX | PRD2 | PP |
| SEQ ID NO: 203 | MEDICAGO TRUNCATULA | PRD2 | PN |
| SEQ ID NO: 204 | MEDICAGO TRUNCATULA | PRD2 | PP |
| SEQ ID NO: 205 | ORYZA SATIVA | PRD2 | PN |
| SEQ ID NO: 206 | ORYZA SATIVA | PRD2 | PP |
| SEQ ID NO: 207 | SETARIA ITALICA | PRD2 | PN |
| SEQ ID NO: 208 | SETARIA ITALICA | PRD2 | PP |
| SEQ ID NO: 209 | SORGHUM BICOLOR | PRD2 | PN |
| SEQ ID NO: 210 | SORGHUM BICOLOR | PRD2 | PP |
| SEQ ID NO: 211 | VITIS VINIFERA | PRD2 | PN |
| SEQ ID NO: 212 | VITIS VINIFERA | PRD2 | PP |
| SEQ ID NO: 213 | ZEA MAYS | PRD2 | PN |
| SEQ ID NO: 214 | :ZEA MAYS | PRD2 | PP |
| SEQ ID NO: 215 | BRASSICA NAPUS | PRD3 | PN |
| SEQ ID NO: 216 | BRASSICA RAPA | PRD3 | PN |
| SEQ ID NO: 217 | BRASSICA RAPA | PRD3 | PP |
| SEQ ID NO: 218 | BRASSICA RAPA | PRD3 | PN |
| SEQ ID NO: 219 | BRASSICA RAPA | PRD3 | PP |
| SEQ ID NO: 220 | GLYCINE MAX | PRD3 | PN |
| SEQ ID NO: 221 | GLYCINE MAX | PRD3 | PP |
| SEQ ID NO: 222 | GLYCINE MAX | PRD3 | PN |
| SEQ ID NO: 223 | GLYCINE MAX | PRD3 | PP |
| SEQ ID NO: 224 | MEDICAGO TRUNCATULA | PRD3 | PN |
| SEQ ID NO: 225 | MEDICAGO TRUNCATULA | PRD3 | PP |
| SEQ ID NO: 226 | ORYZA SATIVA | PRD3 | PN |
| SEQ ID NO: 227 | ORYZA SATIVA | PRD3 | PP |
| SEQ ID NO: 228 | SETARIA ITALICA | PRD3 | PN |
| SEQ ID NO: 229 | SETARIA ITALICA | PRD3 | PP |
| SEQ ID NO: 230 | SORGHUM BICOLOR | PRD3 | PN |
| SEQ ID NO: 231 | SORGHUM BICOLOR | PRD3 | PP |
| SEQ ID NO: 232 | VITIS VINIFERA | PRD3 | PN |
| SEQ ID NO: 233 | VITIS VINIFERA | PRD3 | PP |
| SEQ ID NO: 234 | VITIS VINIFERA | PRD3 | PN |
| SEQ ID NO: 235 | ZEA MAYS | PRD3 | PN |
| SEQ ID NO: 236 | ZEA MAYS | PRD3 | PP |
| SEQ ID NO: 237 | ZEA MAYS | PRD3 | PN |
| SEQ ID NO: 238 | ZEA MAYS | PRD3 | PP |
| SEQ ID NO: 239 | ARABIDOPSIS THALIANA | CENP-O | PN |
| SEQ ID NO: 240 | ARABIDOPSIS THALIANA | CENP-O | PP |
| SEQ ID NO: 241 | BRASSICA NAPUS | CENP-O | PN |
| SEQ ID NO: 242 | BRASSICA RAPA | CENP-O | PN |
| SEQ ID NO: 243 | BRASSICA RAPA | CENP-O | PP |
| SEQ ID NO: 244 | GLYCINE MAX | CENP-O | PN |
| SEQ ID NO: 245 | GLYCINE MAX | CENP-O | PP |
| SEQ ID NO: 246 | GLYCINE MAX | CENP-O | PN |
| SEQ ID NO: 247 | GLYCINE MAX | CENP-O | PP |
| SEQ ID NO: 248 | GLYCINE MAX | CENP-O | PN |
| SEQ ID NO: 249 | GLYCINE MAX | CENP-O | PP |
| SEQ ID NO: 250 | MEDICAGO TRUNCATULA | CENP-O | PN |
| SEQ ID NO: 251 | MEDICAGO TRUNCATULA | CENP-O | PP |
| SEQ ID NO: 252 | ORYZA SATIVA | CENP-O | PN |
| SEQ ID NO: 253 | ORYZA SATIVA | CENP-O | PP |
| SEQ ID NO: 254 | SETARIA ITALICA | CENP-O | PN |
| SEQ ID NO: 255 | SETARIA ITALICA | CENP-O | PP |
| SEQ ID NO: 256 | SETARIA ITALICA | CENP-O | PN |
| SEQ ID NO: 257 | SETARIA ITALICA | CENP-O | PP |
| SEQ ID NO: 258 | SETARIA ITALICA | CENP-O | PN |
| SEQ ID NO: 259 | SETARIA ITALICA | CENP-O | PP |
| SEQ ID NO: 260 | SORGHUM BICOLOR | CENP-O | PN |
| SEQ ID NO: 261 | SORGHUM BICOLOR | CENP-O | PP |
| SEQ ID NO: 262 | SORGHUM BICOLOR | CENP-O | PN |
| SEQ ID NO: 263 | SORGHUM BICOLOR | CENP-O | PN |
| SEQ ID NO: 264 | VITIS VINIFERA | CENP-O | PN |
| SEQ ID NO: 265 | VITIS VINIFERA | CENP-O | PP |
| SEQ ID NO: 266 | ZEA MAYS | CENP-O | PN |
| SEQ ID NO: 267 | ZEA MAYS | CENP-O | PP |
| SEQ ID NO: 268 | ZEA MAYS | CENP-O | PN |
| SEQ ID NO: 269 | ZEA MAYS | CENP-O | PP |
| SEQ ID NO: 270 | ZEA MAYS | CENP-O | PN |
| SEQ ID NO: 271 | ZEA MAYS | CENP-O | PP |
| SEQ ID NO: 272 | GLYCINE MAX | REC8 | PN |
| SEQ ID NO: 273 | GLYCINE MAX | REC8 | PN |
| SEQ ID NO: 274 | GLYCINE MAX | REC8 | PN |
| SEQ ID NO: 275 | ARABIDOPSIS THALIANA | MPRD3 | PN |
| SEQ ID NO: 276 | GLYCINE MAX | MPRD3 GM159 | PN |
| SEQ ID NO: 277 | ARABIDOPSIS THALIANA | MREC8 | PN |
| SEQ ID NO: 278 | GLYCINE MAX | MREC8 GM168C | PN |
| SEQ ID NO: 279 | ARABIDOPSIS THALIANA | MCENH3 A | PN |
| SEQ ID NO: 280 | ARABIDOPSIS THALIANA | 159CENH3 A | PN |
| SEQ ID NO: 281 | ARABIDOPSIS THALIANA | MCENH3 B | PN |
| SEQ ID NO: 282 | ARABIDOPSIS THALIANA | 159CENH3 B | PN |
| SEQ ID NO: 283 | ARABIDOPSIS THALIANA | MCENH3 C | PN |
| SEQ ID NO: 284 | ARABIDOPSIS THALIANA | 159CENH3 C | PN |
| SEQ ID NO: 285 | ARABIDOPSIS THALIANA | MCENH3 D | PN |
| SEQ ID NO: 286 | ARABIDOPSIS THALIANA | 159CENH3 D | PN |
| SEQ ID NO: 287 | ARABIDOPSIS THALIANA | MCENH3 E | PN |
| SEQ ID NO: 288 | ARABIDOPSIS THALIANA | 159CENH3 E | PN |

### I. Apomixis

[0023] Apomixis, or asexual reproduction through seed, results in progeny that are genetic clones of the maternal parent. Apomixis requires a non-reduction of the chromosomes from one parental gamete and subsequent parthenogenic development of the embryo. Apomixis may provide a mechanism to maintain heterosis, or hybrid vigor, in crop plants. The present invention involves a combination of two technologies used to produce a self-reproducing hybrid. The first technology is a methodology to produce clonal non-reduction of the genomic content of gametes or mitosis instead of meiosis (MiMe), as demonstrated in Arabidopsis (d′Erfurth, et al., (2009). PLoS Biol 7:e1000124). The second technology has the capacity to induce parent-specific genome elimination at high frequency (CENH3 GFP-tailswap) (Ravi and Chan, (2010) Nature 464:615-618), Genome Elimination induced by a Mix of CENH3 variants (Marimuthu, et al. (2011) Science 331:876). As used herein, “self-reproducing hybrid” refers to hybrid plants capable of perpetuating a heterozygous genome in progeny following self-fertilization. A demonstration of the capacity for these components to produce self-reproducing plants was shown by Marimuthu, et al., (2011) Science 331:876. However, the efficiency of this system is poor and requires significant modifications to become economically and biologically efficient.

[0024] A. Mitosis instead of Meiosis

[0025] Meiosis is a cell-division mechanism essential for sexually reproducing organisms. In plants, meiosis begins with one diploid cell containing two copies of each chromosome (2n) and produces four haploid gamete cells containing a single recombined copy of each chromosome (1n). Meiosis produces haploid gametes, each having a unique combination of maternal and paternal DNA. Meiosis typically involves chromosomal replication followed by recombination and two rounds of segregation and division. Alternatively, mitosis produces two identical daughter cells following a round of chromosomal replication, segregation, and division.

[0026] Inactivation of specific genes controlling meiosis can alter the chromosomal composition of the resultant gametes. For example, a mutation in the dyad gene of Arabidopsis resulted in female meiosis and megasporogenesis producing a dyad of megaspores, rather than a tetrad (Siddiqi, et al., (2000) Arabidopsis Development 127:197-207). By selectively inactivating a combination of meiosis-related genes, the meiotic divisions can be replaced by a mitotic-like division, resulting in unreduced gametes that are identical to the parent cell (d′Erfurth, et al., (2009) PLoS Biol 7(6):e1000124). Inactivating osd1 resulted in an Arabidopsis mutant that did not undergo meiosis II, giving rise to diploid gametes having recombined chromosomes. Further, a double spo11-1/rec8 Arabidopsis mutant avoids the first division of meiosis and, instead, undergoes a mitotic-like division, followed by an unbalanced second division resulting in chromosomally unbalanced and sterile gametes. A triple osd1/spo11-1/rec8 mutant, designated MiMe, led to a mitotic-like first division due to the Atspo11-1 and Atrec8 mutations, and an absent second meiotic division due to the osd1 mutation. Thus, the MiMe mutations resulted in the replacement of meiosis with a mitotic-like division, thereby producing gametes having genetically identical chromosomes as the parent.

[0027] Various compositions are provided comprising suppression cassettes encoding inhibitory polynucleotides that decrease the activity of target polypeptides. In particular embodiments, silencing elements are provided encoding inhibitory polynucleotides that decrease the activity of Spo11-1, Rec8 or Osd1. In specific embodiments, silencing elements encoding inhibitory polynucleotides are provided that decrease the activity of Spo11-1, Rec8 and Osd1, thereby producing the MiMe phenotype. Such nucleic acid molecule constructs are referred to herein as “MiMe silencing elements”.

[0028] The Spoil family of plant proteins are homologs of archaeal DNA topoisomerase VIA subunit (topo VIA), which participates in DNA replication. Spo11-1 specifically contributes to the creation of double stranded breaks necessary for recombination in the early phases of meiosis, and inactivating Spo11-1 results in sterile plants. Rec8 is responsible for localization of the axial chromosomal elements during meiosis. Following meiosis I, Rec8 has been identified at the centromere, and the depletion of Rec8 eliminated centromeric cohesion. Thus, the presence of Rec8 at the centromere has been thought to maintain sister chromatid cohesion throughout meiosis I (see, Stoop-Myer et al Meiosis: Rec8 is the reason for cohesion (1999) Nat Cell Biol 1:E125-7). Osd1 (omission of second division) is an IV14-like protein identified as a result of its co-regulation with other meiotic genes. In osd1 deficient Arabidopsis plants, the products of male meiosis were dyads instead of tetrads. Further, only tetrapoloid (4n) and triploid (3n) progeny were detected from self-pollinated osd1 deficient mutants. Thus, inactivation of osd1 produced functional diploid gametes due to absence of the second meiotic division.

[0029] In particular embodiments of the present invention, suppression cassettes provided elsewhere herein comprise MiMe silencing elements operably linked to promoters that drive expression in a plant. In some embodiments, promoters operably linked to MiMe silencing elements are inducible promoters. For example, in specific embodiments, MiMe silencing elements are operably linked to inducible promoters activated by a transactivator. As discussed elsewhere herein, the transactivator can be provided in the same plant or in a separate plant subsequently crossed with a plant comprising a MiMe silencing element operably linked to a transactivator-inducible promoter, thereby producing functional diploid gametes.

[0030] In some embodiments, these or other genes may be targeted through knockout, dominant negative allele expression, as hypomorph, as hypermorph, protein inactivation or through silencing. In some embodiments, Spo11-2, Dfo, Prd1, Prd2, Prd3, or Tam1, genes or any ortholog thereof are targeted. In other embodiments, the targeted genes may be am1, am2, pam1, pam2, as1, dsy1, dy1, st1, el1, dv1, va1, va2, or any ortholog thereof. In yet another embodiment, the targeted genes may be AGO4 (ARGONAUTE 4), AGO6 (ARGONAUTE 6), AGO8 (ARGONAUTE 8), AGO9 (ARGONAUTE 9), CMTS (CHROMOMETHYLASE 3), DCL3 (DICER-LIKE 3), DRM2 (DOMAINS REARRANGED METHYLASE 2), EXS1 (EXTRA SPOROGENOUS CELLS1), IDN2 (INVOLVED IN DE NOVO 2), MET1 (METHYL TRANSFERASE 1), NPRD1a (NUCLEAR POLYMERASE D 1a), NRPD1b (NUCLEAR POLYMERASE D 1b), NRPD2 (NUCLEAR POLYMERASE D2), NRPE1 (NUCLEAR RNA POLYMERASE E 1), NRPE2 (NUCLEAR RNA POLYMERASE E 2), RDR2 (RNA-DEPENDENT RNA POLYMERASE 2), RDR6 (RNA-DEPENDENT RNA POLYMERASE 6), SGS3 (SUPPRESSOR OF GENE SILENCING 3), SUVH2 (SUPPRESSOR OF VARIEGATION 3-9 HOMOLOG 2), and SUVH9 (SUPPRESSOR OF VARIEGATION 3-9 HOMOLOG 9), or any ortholog thereof.

[0031] B. Genome Elimination

[0032] A method for producing plants that only inherit chromosomes from one parent can significantly accelerate plant breeding by providing plants in a single generation without the need for generations of inbreeding. By altering the structure of histones of the kinetochore complex (centromere-specific polypeptides), such as CENH3, the chromosomes of the altered parent are eliminated in the zygote, thereby creating haploid plants. The resultant haploid plants have very high male sterility, but when pollinated by wild-type males, the female genome is eliminated at the first zygotic mitosis. In addition to near total male sterility, the resultant plants also show very low rates of female fecundity. In some embodiments, active CENH3 mutant expression can be more widely expressed through the ovule, but a egg cell promoter could be used to express a wild-type CENH3 thus “rescuing” the maternal genome in the resulting zygote but leading to male genome elimination in the zygote and thus a maternal clone.

[0033] Various compositions that employ wild-type and modified kinetochore (centromere-specific) proteins are provided. Methods and compositions are provided comprising, for example, the CENH3, CENPC, MCM21, MIS12, NDC80 or NUF2 centromere-specific proteins. CENH3 proteins are discussed below. Structural and/or functional features of the other kinetochore proteins have been described in, for example, Du, et al., (2010) PLoS Genet. 6:e1000835; Talbert, et al., (2004) J. Biol. 3:18; Sato, et al., (2005) Chrom. Res. 13:827-834; Pidoux, et al., (2000) Opin. Cell Biol. 12:308-319; Du, et al., (2007) Chrom. Res. 15:767-775; Zhang and Dawe, (2011) Chrom. Res. (Mar. 19, 2011 epub) 1-10 and Meraldi, et al., (2006) Genome Biol. 7:R23; all of which are herein incorporated by reference.

[0034] In particular, various compositions that employ CENH3 and modified variants thereof are provided. CENH3 proteins are a well-characterized class of H3 histone protein variants associated with centromere function and development as one of the proteins that form the kinetochore complex. CENH3 proteins are characterized by a variable tail domain, which does not form a rigid secondary structure, and a conserved histone fold domain made up of three α-helical regions connected by loop sections. Additional structural and functional features of CENH3 proteins can be found in, e.g., Cooper, et al., (2004) Mol Biol Evol. 21(9):1712-8, Malik, et al., (2003) Nat Struct Biol. 10(11):882-91; Black, et al., (2008) Curr Opin Cell Biol. 20(1):91-100.

[0035] The CENH3 histone fold domain is conserved between CENH3 proteins from different species and can be distinguished by three a-helical regions connected by loop sections. While it will be appreciated that the exact location of the histone fold domain will vary in CENH3 variants, it will be found at the carboxyl terminus of an endogenous (wild-type) CENH3 protein. The border between the tail domain and the histone fold domain of CENH3 proteins is at, within, or near (i.e., within 5, 10, 15, 20 or 25 amino acids from the “P” of) the conserved PGTVAL (SEQ ID NO: 1) sequence. The PGTVAL sequence is approximately 81 amino acids from the N terminus of the Arabidopsis CENH3 protein, though the distance from the N terminus of different endogenous CENH3 proteins varies. Thus, in some embodiments, the histone fold region of CENH3 employed in the tailswap proteins includes all of the C-terminal amino acids of an endogenous CENH3 protein (or a protein substantially similar to the endogenous sequence) up to and including the PGTVAL. In other embodiments, the tailswap proteins can comprise more or less of the CENH3 sequence. For example, in some embodiments, the tailswap will comprise the C-terminal sequence of a CENH3 protein, but only up to an amino acid 5, 10, 15, 20 or 25 amino acids in the C-terminal direction from the “P” of the conserved PGTVAL sequence. In some embodiments, the tailswap will comprise the C-terminal sequence of a CENH3 protein, but only up to 5, 10, 15, 20 or 25 amino acids in the N-terminal direction from the “P” of the conserved PGTVAL sequence.

[0036] Any number of mutations of CENH3 can be introduced into a CENH3 protein to generate a mutated (including but not limited to a recombinantly altered) CENH3 protein capable of generating haploid plants when expressed in a plant having suppressed expression of an endogenous CENH3 protein, and wherein wild-type CENH3 protein is provided to the resulting transgenic plant. For example, wild-type CENH3 can be provided by crossing a transgenic plant expressing an active CENH3 mutant to a plant expressing a wild-type CENH3 protein. Active CENH3 mutant proteins can be identified, for example, by random mutagenesis, by single or multiple amino acid targeted mutagenesis, by generation of complete or partial protein domain deletions, by fusion with heterologous amino acid sequences, or by combinations thereof. Active centromere-specific mutant polypeptides refer to polypeptides that, when expressed in a plant in which the wild-type centromere-specific polypeptide is knocked out or inactivated, result in viable plants, which viable plants when crossed to a wild-type plant, produce haploid progeny at a more than normal frequency (e.g., at least 0.1, 0.5, 1, 5, 10, 20% or more). For example, “active CENH3 mutant proteins” refer to proteins that, when expressed in a plant in which CENH3 is knocked out or inactivated, result in viable plants, which viable plants when crossed to a wild-type plant, produce haploid progeny at a more than normal frequency (e.g., at least 0.1, 0.5, 1, 5, 10, 20% or more). Active mutated CENH3 proteins can be readily tested by recombinant expression of the mutated CENH3 protein in a plant lacking endogenous CENH3 protein, crossing the transgenic plant (as a male or female, depending on fertility) to a plant expressing wild-type CENH3 protein, and then screening for the production of haploid progeny.

[0037] In some embodiments, an active CENH3 mutant protein is identical to an endogenous CENH3 protein but for 1, 2, 3, 4, 5, 6, 7, 8 or more (e.g., 1-2, 1-4, 1-8) amino acids. For example, in some embodiments, the endogenous wild-type protein from the plant is identical or substantially identical to SEQ ID NO: 5 and the active CENH3 mutant protein differs from the endogenous CENH3 protein by 1, 2, 3, 4, 5, 6, 7, 8 or more (e.g., 1-2, 1-4, 1-8) amino acids. It is believed that active CENH3 mutants include, for example, proteins comprising: a heterologous amino acid sequence (including but not limited to green fluorescent protein (GFP)) linked to a CENH3 truncated or complete tail domain or non-CENH3 tail domain, either of which is linked to a CENH3 histone fold domain or a CENH3 truncated tail domain, the heterologous CENH3 tail domain or non-CENH3 tail domain, either of which is linked to a CENH3 histone fold domain. In some embodiments, the active CENH3 mutant protein comprises a fusion of an amino-terminal heterologous amino acid sequence to the histone-fold domain of a CENH3 protein. Generally, the histone fold domain will be identical or at least substantially identical to the CENH3 protein endogenous to the organism in which the active CENH3 mutant protein will be expressed. In some embodiments, the active CENH3 mutant protein will include a histone tail domain, which can be, for example, a non-CENH3 tail domain, or a CENH3 tail domain.

[0038] It is believed that a large number of different amino acid sequences, when linked to a protein comprising a CENH3 histone-fold domain and a sequence that can function as or replace a histone tail domain, can be used to construct an active CENH3 mutant. In some embodiments, a heterologous sequence is linked directly to the CENH3 histone-fold domain.

[0039] In some embodiments, the heterologous sequence is an intervening amino acid sequence linked to the CENH3 histone-fold domain. In some embodiments, the intervening amino acid sequence is an intact or truncated CENH3 tail domain. The heterologous amino acid sequence, in combination with the histone-fold domain, will be sufficient to prevent the lethality associated with loss of endogenous CENH3, but will sufficiently disrupt centromeres to allow for production of haploid progeny, as discussed herein. Thus, in some embodiments, the heterologous amino acid sequence will comprise a portion that is, or mimics the function of, a histone tail domain and optionally can also comprise a bulky amino acid sequence that disrupts centromere function. In certain embodiments, at least a portion of the heterologous amino acid sequence of the mutated CENH3 protein comprises any amino acid sequence of at least 10, 20, 30, 40, 50, e.g., 10-30, 10-50, 20-50, 30-50 amino acids, optionally lacking a stable secondary structure (e.g., lacking coils, helices or beta-sheets). In some embodiments, the tail domain has less than 90, 80 or 70% identity with the tail domain (e.g., the N-terminal 135 amino acids) of the CENH3 protein endogenous to the organism in which the mutated CENH3 protein will be expressed. In some embodiments, the tail domain of the mutated CENH3 protein comprises the tail domain of a non-CENH3 histone protein, including but not limited to an H3 histone protein. In some embodiments, the tail domain of the mutated CENH3 protein comprises the tail domain of a non-CENH3 histone protein endogenous to the organism in which the mutated CENH3 protein will be expressed. In some embodiments, the tail domain of the mutated CENH3 protein comprises the tail domain of a homologous or orthologous (from a different plant species) CENH3 tail. For example, it has been found that GFP fused to a maize CENH3 tail domain linked to an Arabidopsis CENH3 histone-fold domain is active.

[0040] As noted above, in some embodiments, the tail domain of an H3 histone (not to be confused with a CENH3 histone) is used as the tail domain portion of the active CENH3 mutant protein (these embodiments are sometimes referred to as “tailswap” proteins). Plant H3 tail domains are well conserved in various organisms.

[0041] In some embodiments, active CENH3 mutant proteins will lack at least a portion (e.g., at least 5, 10, 15, 20, 25, 30 or more amino acids) of the endogenous CENH3 N-terminal region, and thus, in some embodiments, will have a truncated CENH3 tail domain compared to a wild-type endogenous CENH3 protein. Active CENH3 mutant proteins may, or may not, be linked to a heterologous sequence.

[0042] Optionally, the heterologous amino acid sequence can comprise, or further comprise, one or more amino acid sequences at the amino and/or carboxyl terminus and/or linking the tail and histone fold domains. For example, in some embodiments, the active CENH3 mutant protein (e.g., a tailswap or other active CENH3 mutant protein) comprises a heterologous amino acid sequence linked to the amino end of the tail domain. In some embodiments, the heterologous sequence is linked to the amino terminus of an otherwise wild-type CENH3 protein, wherein the heterologous sequence interferes with centromere function. For example, it has been found that GFP, when linked to wild-type CENH3, sufficiently disrupts centromeres to allow for production of haploid progeny. It is believed that the heterologous sequence can be any sequence that disrupts the CENH3 protein's ability to maintain centromere function. Thus, in some embodiments, the heterologous sequence comprises an amino acid sequence of at least 5, 10, 15, 20, 25, 30, 50 or more kD.

[0043] In some embodiments, the active CENH3 mutant protein will comprise a protein domain that acts as a detectable or selectable marker. For example, an exemplary selectable marker protein is fluorescent or an antibiotic or herbicide resistance gene product. Selectable or detectable protein domains are useful for monitoring the presence or absence of the mutated CENH3 protein in an organism.

[0044] In other embodiments, expression cassettes are provided comprising an active CENH3 mutant protein operably linked to a promoter that drives expression in a plant. In particular embodiments, promoters operably linked to active CENH3 mutant proteins are inducible promoters or tissue-specific promoters. For example, in specific embodiments, active CENH3 mutant proteins are operably linked to promoters specifically induced in the ovule of a plant.

[0045] In some embodiments, expression cassettes comprising a nucleotide sequence encoding wild-type CENH3 operably linked to a promoter that drives expression in a plant are provided. In particular embodiments, promoters operably linked to nucleotide sequences encoding wild-type CENH3 are tissue specific promoters. For example, nucleotide sequences encoding wild-type CENH3 operably linked to central cell-specific promoters (e.g., AT-DD65 promoter, AT-DD9 promoter, or AT-DD25 promoter) that drive expression of wild-type CENH3 in the central cell of a plant are provided. Expression cassettes comprising a central-cell specific promoter operably linked to a polynucleotide encoding wild-type CENH3 can be provided in the same parental plant as CENH3 suppression cassettes and/or the same parental plant as active CENH3 mutant expression cassettes.

[0046] Further provided are inhibitory polynucleotides that decrease the activity of wild-type CENH3. In some embodiments, suppression cassettes comprising a silencing element encoding inhibitory polynucleotides that decrease the activity of wild-type CENH3 operably linked to an inducible promoter that drives expression in a plant are provided. In specific embodiments, suppression cassettes comprising a silencing element encoding inhibitory polynucleotides that decrease the activity of wild-type CENH3 operably linked to a promoter specifically induced by a transactivator are provided. As discussed elsewhere herein, the transactivator can be provided in the same plant or in a separate plant subsequently crossed with a plant comprising a CENH3 silencing element operably linked to a transactivator-inducible promoter, thereby activating the CENH3 silencing element in the progeny plant. In some embodiments, a recombinase may be used to eliminate a buffering component between a promoter and the DNA region encoding the inhibitory polynucleotides.

[0047] In a particular embodiment, a first plant comprising an active CENH3 mutant expression cassette comprising a central cell-specific promoter, a CENH3 suppression cassette comprising a transactivator A-inducible promoter, a CENH3 expression cassette comprising an egg-cell specific promoter and a transactivator B expression cassette comprising an ovule-specific promoter is crossed with a second plant comprising an active CENH3 mutant expression cassette comprising a sperm-cell preferred promoter, a MiMe suppression cassette comprising a transactivator B-inducible promoter and a transactivator A expression cassette comprising an ovule-specific promoter, producing a tetraploid zygote that subsequently loses the male genome from the sperm cell following a generation of self fertilization, ultimately resulting in a self-reproducing hybrid progeny plant.

[0048] C. Methods for Producing Self-Reproducing Hybrid Plants

[0049] A single-cross hybrid plant results from the cross of two inbred varieties, each of which has a genotype that complements the genotype of the other. A hybrid progeny of the first generation is designated F1. In the development of commercial hybrids in a plant breeding program, the F1 hybrid plants are most desired. F1 hybrids are more vigorous than their inbred parents. This hybrid vigor, or heterosis, can be manifested in many polygenic traits, including increased vegetative growth and increased yield.

[0050] Crossing a pollen parent plant comprising cassettes for suppressing the activity of an endogenous kinetochore complex protein (e.g., CENH3, CENPC, MCM21, MIS12, NDC80 or NUF2 protein) in progeny ovules and cassettes for expressing an endogenous kinetochore complex protein in the egg cell of progeny to an ovule parent plant comprising cassettes for expressing inhibitory polynucleotides resulting in a MiMe phenotype in progeny and cassettes for expressing an active mutated kinetochore complex protein (e.g., a tailswap or other mutated CENH3 or non-CENH3 kinetochore complex protein) in the ovule and sperm-cells of progeny as described herein, will result in at least some progeny (e.g., at least 0.1%, 0.5%, 1%, 5%, 10%, 20% or more) that are diploid following self-fertilization, and comprise only chromosomes from the female parent that expresses the kinetochore complex protein. Thus, the present invention allows for the generation of clonal diploid plants capable of self-reproducing.

[0051] While the present invention is not known to depend on a particular mechanism, it is believed that the methods of the present invention increase self-reproducing hybrid seed viability by preventing parental genome elimination in the central cell of the ovule. It is further believed that complementing the central cell with active mutant CENH3, such as that delivered from the sperm cells, allows proper endosperm development by maintaining a 2M:1P (2 maternal:1 paternal) ratio necessary for proper endosperm development.

[0052] In some embodiments, a method for producing a self-reproducing hybrid plant is provided comprising crossing a first plant comprising a first suppression cassette comprising a MiMe silencing element and a first expression cassette expressing an active CENH3 mutant protein with a second plant comprising a second suppression cassette that reduces the level of wild-type CENH3 and a second expression cassette expressing CENH3 specifically in the egg cell. Self fertilization of the resultant progeny plant results in the elimination of the male diploid genome in the zygote and normal development of the endosperm, thereby producing a self-reproducing hybrid plant.

### II. Compositions

[0053] Compositions disclosed herein provide nucleic acid molecule constructs comprising expression and suppression cassettes comprising polynucleotides related to meiosis or genome elimination. As used herein, “meiosis-related” or “MiMe-related” refers to those polynucleotides encoding polypeptides involved directly or indirectly in the process of meiosis. Further, as used herein, “kinetochore” or “CENH3” refers to the specialized protein structure on choromosomes that mediates the attachment of spindle fibers during cell division.

[0054] Decreasing the level of polynucleotides encoding such polypeptides or decreasing the activity of the encoded polypeptides could result in absence of the first meiotic division, meiosis II, or unbalanced second meiotic divisions. Methods for measuring the level of polynucleotides and activity of the encoded polypeptides are disclosed elsewhere herein. For example, RNA transcripts are monitored through the use of qRT-PCR. SybrGreen or TaqMan probes may be used. Polypeptide activities are assayed indirectly through cytogenetics and progeny segregation analysis.

[0055] By “reduces”, “reducing”, “decrease”, or “decreasing” the expression level of a polynucleotide or activity of a polypeptide encoded thereby is intended to mean, the polynucleotide or polypeptide level of the target sequence is statistically lower than the polynucleotide level or polypeptide level of the same target sequence in an appropriate control plant that is not expressing the silencing element. In particular embodiments of the invention, reducing the polynucleotide level and/or the polypeptide level of the target sequence in a plant according to the invention results in less than 95%, less than 90%, less than 80%, less than 70%, less than 60%, less than 50%, less than 40%, less than 30%, less than 20%, less than 10% or less than 5% of the polynucleotide level or the level of the polypeptide encoded thereby, of the same target sequence in an appropriate control plant. Methods to assay for the level of the RNA transcript, the level of the encoded polypeptide or the activity of the polynucleotide or polypeptide are known in the art and discussed elsewhere herein.

[0056] A. Silencing Elements

[0057] Further provided are nucleic acid molecules comprising nucleotide sequences encoding inhibitory nucleic acids, and fragments and variants thereof that are useful in decreasing the level of proteins responsible for normal meiosis and wild-type kinetochore activity. Such fragments and variants are useful in silencing elements and suppression cassettes.

[0058] By “silencing elements” is intended polynucleotides that can reduce or eliminate the expression level of a target sequence by influencing the level of the target RNA transcript or, alternatively, by influencing translation and thereby affecting the level of the encoded polypeptide. As used herein, a “target sequence” or “target polynucleotide” comprises any sequence that one desires to reduce the level of expression. In specific embodiments, the target sequence comprises the nucleotide sequence set forth in SEQ ID NO: 2, 3 and 4 and decreasing the level of expression of the target sequence results in an alteration of normal meiosis activity. In other embodiments, the target sequence comprises the nucleotide sequence set forth in SEQ ID NO: 5. Methods to assay for functional silencing elements that are capable of reducing or eliminating the level of a sequence of interest are known in the art.

[0059] As discussed in further detail below, silencing elements can include, but are not limited to, a sense suppression element, an antisense suppression element, a double stranded RNA, an siRNA, an amiRNA, an miRNA or a hairpin suppression element. Non-limiting examples of silencing elements that can be employed to decreased expression of meiosis-related genes or CENH3 genes comprise fragments and variants of the sense or antisense sequence of the sequences set forth in SEQ ID NOS: 2, 3, 4 and/or 5. In other embodiments, dominant negative mutants, directed mutation or protein fragments may be used to suppress, or alter target function.

[0060] i. Sense Suppression Elements

[0061] Silencing elements of the invention may comprise a sense suppression element. As used herein, a “sense suppression element” comprises a polynucleotide designed to express an RNA molecule corresponding to at least a part of a target messenger RNA in the “sense” orientation. Expression of the RNA molecule comprising the sense suppression element reduces or eliminates the level of the target polynucleotide or the polypeptide encoded thereby. The polynucleotide comprising the sense suppression element may correspond to all or part of the sequence of the target polynucleotide, all or part of the 5′ and/or 3′ untranslated region of the target polynucleotide, all or part of the coding sequence of the target polynucleotide or all or part of both the coding sequence and the untranslated regions of the target polynucleotide.

[0062] Typically, a sense suppression element has substantial sequence identity to the target polynucleotide, typically greater than about 65% sequence identity, greater than about 85% sequence identity, about 90%, 91%, 92%, 93%, 94%, 95%, 96%, 97%, 98% or 99% sequence identity. See, U.S. Pat. Nos. 5,283,184 and 5,034,323, herein incorporated by reference. The sense suppression element can be any length so long as it allows for the suppression of the targeted sequence. The sense suppression element can be, for example, the full-length nucleotide sequence of SEQ ID NOS: 2, 3, 4 and 5 or about 10, 15, 16, 17, 18, 19, 20, 22, 25, 30, 50, 100, 150, 200, 250, 300, 350, 400, 450, 500 nucleotides or longer of the nucleotides set forth in SEQ ID NOS: 2, 3, 4 and 5. In other embodiments, the sense suppression element can be, for example, the full-length nucleotide sequence of SEQ ID NOS: 2, 3, 4 and 5 or about 10, 15, 16, 17, 18, 19, 20, 22, 25, 30, 50, 100, 150, 200, 250, 300, 350, 400, 450, 500, 600, 700, 900, 1000, 1100, 1200, 1300, 1400, 1500 nucleotides or longer of the nucleotides set forth in SEQ ID NOS: 2, 3, 4 and 5.

[0063] ii. Antisense Suppression Elements

[0064] Silencing elements of the invention may comprise an antisense suppression element. As used herein, an “antisense suppression element” comprises a polynucleotide that is designed to express an RNA molecule complementary to all or part of a target messenger RNA. Expression of the antisense RNA suppression element reduces or eliminates the level of the target polynucleotide. The polynucleotide for use in antisense suppression may correspond to all or part of the complement of the sequence encoding the target polynucleotide, all or part of the complement of the 5′ and/or 3′ untranslated region of the target polynucleotide, all or part of the complement of the coding sequence of the target polynucleotide, or all or part of the complement of both the coding sequence and the untranslated regions of the target polynucleotide. In addition, the antisense suppression element may be fully complementary (i.e., 100% identical to the complement of the target sequence) or partially complementary (i.e., less than 100% identical to the complement of the target sequence) to the target polynucleotide.

[0065] In specific embodiments, the antisense suppression element comprises at least 85%, 90%, 91%, 92%, 93%, 94%, 95%, 96%, 97%, 98% or 99% sequence complementarity to the target polynucleotide. Antisense suppression may be used to inhibit the expression of multiple proteins in the same plant. See, for example, U.S. Pat. No. 5,942,657. Furthermore, the antisense suppression element can be complementary to a portion of the target polynucleotide.

[0066] In one example, sequences of at least about 15, 16, 17, 18, 19, 20, 22, 25, 50, 100, 200, 300, 400, 450, 500 nucleotides or longer of the nucleotides set forth in SEQ ID NOS: 2, 3, 4 and 5, or a complement thereof, may be used. In another example, sequences of at least about 15, 16, 17, 18, 19, 20, 22, 25, 50, 100, 200, 300, 400, 450, 500, 600, 700, 900, 1000, 1100, 1200, 1300, 1400, 1500 nucleotides or longer of the nucleotides set forth in SEQ ID NOS: 2, 3, 4 and 5, or a complement thereof, may be used. Methods for using antisense suppression to inhibit the expression of endogenous genes in plants are described, for example, in Liu, et al., (2002) Plant Physiol. 129:1732-1743 and U.S. Pat. Nos. 5,759,829 and 5,942,657, each of which is herein incorporated by reference.

[0067] iii. Double Stranded RNA Suppression Element

[0068] Silencing elements of the invention may comprise a double stranded RNA silencing element. A “double stranded RNA silencing element” or “dsRNA” comprises at least one transcript that is capable of forming a dsRNA. Thus, a “dsRNA silencing element” includes a dsRNA, a transcript or polyribonucleotide capable of forming a dsRNA, or more than one transcript or polyribonucleotide capable of forming a dsRNA. “Double stranded RNA” or “dsRNA” refers to a polyribonucleotide structure formed either by a single self-complementary RNA molecule or a polyribonucleotide structure formed by the expression of least two distinct RNA strands. The dsRNA molecule(s) employed in the methods and compositions of the invention mediate the reduction of expression of a target sequence, for example, by mediating RNA interference “RNAi” or gene silencing in a sequence-specific manner. In the context of the present invention, the dsRNA is capable of reducing or eliminating the level or expression of a target polynucleotide or the polypeptide encoded thereby in a plant.

[0069] The dsRNA can reduce or eliminate the expression level of the target sequence by influencing the level of the target RNA transcript, by influencing translation and thereby affecting the level of the encoded polypeptide, or by influencing expression at the pre-transcriptional level (i.e., via the modulation of chromatin structure, methylation pattern, etc., to alter gene expression). See, for example, Verdel, et al., (2004) Science 303:672-676; Pal-Bhadra, et al., (2004) Science 303:669-672; Allshire, (2002) Science 297:1818-1819; Volpe, et al., (2002) Science 297:1833-1837; Jenuwein, (2002) Science 297:2215-2218 and Hall, et al., (2002) Science 297:2232-2237. Methods to assay for functional dsRNA that are capable of reducing or eliminating the level of a sequence of interest are disclosed elsewhere herein. Accordingly, as used herein, the term “dsRNA” is meant to encompass other terms used to describe nucleic acid molecules that are capable of mediating RNA interference or gene silencing, including, for example, short-interfering RNA (sRNA), double-stranded RNA (dsRNA), micro-RNA (miRNA), artificial micro-RNA (amiRNA), hairpin RNA, short hairpin RNA (shRNA), post-transcriptional gene silencing RNA (ptgsRNA), and others.

[0070] In specific embodiments, at least one strand of the duplex or double-stranded region of the dsRNA shares sufficient sequence identity or sequence complementarity to the target polynucleotide to allow for the dsRNA to reduce the level of expression of the target sequence. As used herein, the strand that is complementary to the target polynucleotide is the “antisense strand” and the strand homologous to the target polynucleotide is the “sense strand.”

[0071] In another embodiment, the dsRNA comprises a hairpin RNA. A hairpin RNA comprises an RNA molecule that is capable of folding back onto itself to form a double-stranded structure. Multiple structures can be employed as hairpin elements. In specific embodiments, the dsRNA suppression element comprises a hairpin element that comprises in the following order, a first segment, a second segment, and a third segment, where the first and the third segment share sufficient complementarity to allow the transcribed RNA to form a double-stranded stem-loop structure.

[0072] The “second segment” of the hairpin comprises a “loop” or a “loop region.” These terms are used synonymously herein and are to be construed broadly to comprise any nucleotide sequence that confers enough flexibility to allow self-pairing to occur between complementary regions of a polynucleotide (i.e., and 3 which form the stem of the hairpin). For example, in some embodiments, the loop region may be substantially single stranded and act as a spacer between the self-complementary regions of the hairpin stem-loop. In some embodiments, the loop region can comprise a random or nonsense nucleotide sequence and thus not share sequence identity to a target polynucleotide. In other embodiments, the loop region comprises a sense or an antisense RNA sequence or fragment thereof that shares identity to a target polynucleotide. See, for example, International Patent Publication Number WO 2002/00904, herein incorporated by reference. In specific embodiments, the loop region can be optimized to be as short as possible while still providing enough intramolecular flexibility to allow the formation of the base-paired stem region. Accordingly, the loop sequence is generally less than about 1500, 1400, 1300, 1200, 1100, 1000, 900, 800, 700, 600, 500, 400, 300, 200, 100, 50, 25, 20, 19, 18, 17, 16, 15, 10 nucleotides or less.

[0073] The “first” and the “third” segment of the hairpin RNA molecule comprise the base-paired stem of the hairpin structure. The first and the third segments are inverted repeats of one another and share sufficient complementarity to allow the formation of the base-paired stem region. In specific embodiments, the first and the third segments are fully complementary to one another. Alternatively, the first and the third segment may be partially complementary to each other so long as they are capable of hybridizing to one another to form a base-paired stem region. The amount of complementarity between the first and the third segment can be calculated as a percentage of the entire segment. Thus, the first and the third segment of the hairpin RNA generally share at least 50%, 60%, 70%, 80%, 85%, 90%, 91%, 92%, 93%, 94%, 95%, 96%, 97%, 98%, 99%, up to and including 100% complementarity.

[0074] In specific embodiments, the sequences used in the first, the second, and/or the third segments comprise domains that are designed to have sufficient sequence identity to a target polynucleotide of interest and thereby have the ability to decrease the level of expression of the target polynucleotide. The specificity of the inhibitory RNA transcripts is therefore generally conferred by these domains of the silencing element. Thus, in some embodiments of the invention, the first, second and/or third segment of the silencing element comprise a domain having at least 10, at least 15, at least 19, at least 20, at least 21, at least 22, at least 23, at least 24, at least 25, at least 30, at least 40, at least 50, at least 100, at least 200, at least 300, at least 500, at least 1000 or more than 1000 nucleotides that share sufficient sequence identity to the target polynucleotide to allow for a decrease in expression levels of the target polynucleotide when expressed in an appropriate cell.

[0075] In further embodiments, the domain of the first, the second, and/or the third segment has 100% sequence identity to the target polynucleotide. In other embodiments, the domain of the first, the second and/or the third segment having homology to the target polypeptide have at least 50%, 60%, 70%, 80%, 85%, 90%, 91%, 92%, 93%, 94%, 95%, 96%, 97%, 98%, 99% or greater sequence identity to a region of the target polynucleotide. The sequence identity of the domains of the first, the second and/or the third segments to the target polynucleotide need only be sufficient to decrease expression of the target polynucleotide of interest. See, for example, Chuang and Meyerowitz, (2000) Proc. Natl. Acad. Sci. USA 97:4985-4990; Stoutjesdijk, et al., (2002) Plant Physiol. 129:1723-1731; Waterhouse and Helliwell, (2003) Nat. Rev. Genet. 4:29-38; Pandolfini, et al., BMC Biotechnology 3:7 and US Patent Application Publication Number 2003/0175965, each of which is herein incorporated by reference. A transient assay for the efficiency of hairpin RNA constructs to silence gene expression in vivo has been described by Panstruga, et al., (2003) Mol. Biol. Rep. 30:135-140, herein incorporated by reference.

[0076] The amount of complementarity shared between the first, second, and/or third segment and the target polynucleotide or the amount of complementarity shared between the first segment and the third segment (i.e., the stem of the hairpin structure) may vary depending on the organism in which gene expression is to be controlled. Some organisms or cell types may require exact pairing or 100% identity, while other organisms or cell types may tolerate some mismatching.

[0077] Any region of the target polynucleotide can be used to design the domain of the silencing element that shares sufficient sequence identity to allow expression of the hairpin transcript to decrease the level of the target polynucleotide. For instance, the domain can be designed to share sequence identity to the 5′ untranslated region of the target polynucleotide(s), the 3′ untranslated region of the target polynucleotide(s), exonic regions of the target polynucleotide(s), intronic regions of the target polynucleotide(s) and any combination thereof. In some instances, to optimize the siRNA sequences employed in the hairpin, the synthetic oligodeoxyribonucleotide/RNAse H method can be used to determine sites on the target mRNA that are in a conformation that is susceptible to RNA silencing. See, for example, Vickers, et al., (2003) J. Biol. Chem 278:7108-7118 and Yang, et al., (2002) Proc. Natl. Acad. Sci. USA 99:9442-9447, herein incorporated by reference. These studies indicate that there is a significant correlation between the RNase-H-sensitive sites and sites that promote efficient siRNA-directed mRNA degradation.

[0078] In particular embodiments, the hairpin RNAs of the invention may also comprise an intron. For such intron-containing hairpin RNAs, the interfering molecules have the same general structure as for the hairpin RNAs described herein above, but the RNA molecule additionally comprises an intron that is capable of being spliced in the cell in which the hairpin RNA is expressed. The use of an intron minimizes the size of the loop in the hairpin RNA molecule following splicing, and this increases the efficiency of interference. See, for example, Smith, et al., (2000) Nature 407:319-320. In fact, Smith, et al., show 100% suppression of endogenous gene expression using intron-containing hairpin RNA-mediated interference. Methods for using intron-containing hairpin RNA interference to inhibit the expression of endogenous plant genes are described, for example, in Smith, et al., (2000) Nature 407:319-320; Wesley, et al., (2001) Plant J. 27:581-590; Wang and Waterhouse, (2001) Curr. Opin. Plant Biol. 5:146-150; Waterhouse and Helliwell, (2003) Nat. Rev. Genet. 4:29-38; Helliwell and Waterhouse, (2003) Methods 30:289-295, and US Patent Application Publication Number 2003/0180945, each of which is herein incorporated by reference.

[0079] In addition, transcriptional gene silencing (TGS) may be accomplished through use of a hairpin suppression element where the inverted repeat of the hairpin shares sequence identity with the promoter region of a target polynucleotide to be silenced. See, for example, Aufsatz, et al., (2002) PNAS 99(4):16499-16506 and Mette, et al., (2000) EMBO J 19(19):5194-5201.

[0080] In other embodiments, the dsRNA can comprise a small RNA (sRNA). sRNAs can comprise both micro RNA (miRNA) and short-interfering RNA (siRNA) (Meister and Tuschl, (2004) Nature 431:343-349 and Bonetta, et al., (2004) Nature Methods 1:79-86). miRNAs are regulatory agents comprising about 19 ribonucleotides which are highly efficient at inhibiting the expression of target polynucleotides. See, for example Javier, et al., (2003) Nature 425:257-263, herein incorporated by reference. For miRNA interference, the silencing element can be designed to express a dsRNA molecule that forms a hairpin structure containing a 19-nucleotide sequence that is complementary to the target polynucleotide of interest. The miRNA can be synthetically made, or transcribed as a longer RNA which is subsequently cleaved to produce the active miRNA. Specifically, the miRNA can comprise 19 nucleotides of the sequence having homology to a target polynucleotide in sense orientation and 19 nucleotides of a corresponding antisense sequence that is complementary to the sense sequence.

[0081] When expressing an miRNA, it is recognized that various forms of an miRNA can be transcribed including, for example, the primary transcript (termed the “pri-miRNA”) which is processed through various nucleolytic steps to a shorter precursor miRNA (termed the “pre-miRNA”), the pre-miRNA or the final (mature) miRNA is present in a duplex, the two strands being referred to as the miRNA (the strand that will eventually basepair with the target) and miRNA*. The pre-miRNA is a substrate for a form of dicer that removes the miRNA/miRNA* duplex from the precursor, after which, similarly to siRNAs, the duplex can be taken into the RISC complex. It has been demonstrated that miRNAs can be transgenically expressed and be effective through expression of a precursor form, rather than the entire primary form (Parizotto, et al., (2004) Genes & Development 18:2237-2242 and Guo, et al., (2005) Plant Cell 17:1376-1386).

[0082] Artificial microRNAs (amiRNAs) have recently been described in Arabidopsis targeting viral mRNA sequences (Niu, et al., (2006) Nature Biotechnology 24:1420-1428) or endogenous genes (Schwab, et al., (2006) Plant Cell 18:1121-1133). The amiRNA construct can be expressed under different promoters in order to change the spatial pattern of silencing (Schwab, et al., (2006) Plant Cell 18:1121-1133). Artificial miRNAs replace the microRNA and its complementary star sequence in a precursor miRNA and substitute sequences that target an mRNA to be silenced. Silencing by endogenous miRNAs can be found in a variety of spatial, temporal, and developmental expression patterns (Parizotto, et al., (2007) Genes Dev 18:2237-2242; Alvarez, et al., (2006) Plant Cell 18:1134-51). Artificial miRNA can be constructed to both capture and extend the diversity and specificity in the patterns of silencing.

[0083] The methods and compositions of the invention can employ silencing elements that, when transcribed, form a dsRNA molecule. Accordingly, the heterologous polynucleotide being expressed need not form the dsRNA by itself, but can interact with other sequences in the plant cell to allow the formation of the dsRNA. For example, a chimeric polynucleotide that can selectively silence the target polynucleotide can be generated by expressing a chimeric construct comprising the target sequence for a miRNA or siRNA to a sequence corresponding to all or part of the gene or genes to be silenced. In this embodiment, the dsRNA is “formed” when the target for the miRNA or siRNA interacts with the miRNA present in the cell. The resulting dsRNA can then reduce the level of expression of the gene or genes to be silenced. See, for example, US Patent Application Publication Number 2007/0130653, entitled “Methods and Compositions for Gene Silencing”, herein incorporated by reference. The construct can be designed to have a target for an endogenous miRNA or alternatively, a target for a heterologous and/or synthetic miRNA can be employed in the construct. If a heterologous and/or synthetic miRNA is employed, it can be introduced into the cell on the same nucleotide construct as the chimeric polynucleotide or on a separate construct. As discussed elsewhere herein, any method can be used to introduce the construct comprising the heterologous miRNA.

[0084] In specific embodiments, the compositions of the invention include nucleic acid molecules that comprise the nucleotide sequence of Spo11-1 (SEQ ID NO: 2), Osd1 (SEQ ID NO: 3), Rec8 (SEQ ID NO: 4) and CENH3 (SEQ ID NO: 5) nucleotide sequences. Alternatively, such nucleic acid molecules comprise a nucleotide sequence that selectively hybridizes with SEQ ID NOS: 2, 3, 4 and/or 5. Furthermore, such isolated polynucleotides may comprise a nucleotide sequence comprising the complementary sequence to SEQ ID NOS: 2, 3, 4 and/or 5 or the complementary sequence to a nucleotide sequence that selectively hybridizes with SEQ ID NOS: 2, 3, 4 and/or 5.

[0085] iv. Gene mutation and homologous recombination

[0086] Guide RNA/CAS Endonuclease Systems
[0087] (1) CRISPR loci

[0088] CRISPR loci (Clustered Regularly Interspaced Short Palindromic Repeats) (also known as SPIDRs—SPacer Interspersed Direct Repeats) constitute a family of recently described DNA loci. CRISPR loci consist of short and highly conserved DNA repeats (typically 24 to 40 bp, repeated from 1 to 140 times-also referred to as CRISPR-repeats) which are partially palindromic. The repeated sequences (usually specific to a species) are interspaced by variable sequences of constant length (typically 20 to 58 by depending on the CRISPR locus (International Patent Application Publication Number WO 2007/024097, published Mar. 1, 2007).

[0089] CRISPR loci were first recognized in E. coli (Ishino, et al., (1987) J. Bacterial. 169:5429-5433; Nakata, et al., (1989) J. Bacterial. 171:3553-3556). Similar interspersed short sequence repeats have been identified in Haloferax mediterranei, Streptococcus pyogenes, Anabaena and Mycobacterium tuberculosis (Groenen, et al., (1993) Mol. Microbiol. 10:1057-1065; Hoe, et al., (1999) Emerg. Infect. Dis. 5:254-263; Masepohl, et al., (1996) Biochim. Biophys. Acta 1307:26-30; Mojica, et al., (1995) Mol. Microbiol. 17:85-93). The CRISPR loci differ from other SSRs by the structure of the repeats, which have been termed short regularly spaced repeats (SRSRs) (Janssen, et al., (2002) OMICS J. Integ. Biol. 6:23-33; Mojica, et al., (2000) Mol. Microbiol. 36:244-246). The repeats are short elements that occur in clusters, that are always regularly spaced by variable sequences of constant length (Mojica, et al., (2000) Mol. Microbiol. 36:244-246).

[0090] (2) Cas Genes, Cas Endonucleases

[0091] As used herein, the term “Cas gene” refers to a gene that is generally coupled, associated or close to or in the vicinity of flanking CRISPR loci. The terms “Cas gene”, “CRISPR-associated (Cas) gene” are used interchangeably herein. A comprehensive review of the Cas protein family is presented in Haft, et al., (2005) Computational Biology, PLoS Comput Biol 1(6):e60. doi:10.1371/journal.pcbi.0010060.

[0092] As described therein, 41 CRISPR-associated (Cas) gene families are described, in addition to the four previously known gene families. It shows that CRISPR systems belong to different classes, with different repeat patterns, sets of genes, and species ranges. The number of Cas genes at a given CRISPR locus can vary between species.

[0093] As used herein, the term “Cas endonuclease” refers to a Cas protein encoded by a Cas gene, wherein said Cas protein is capable of introducing a double strand break into a DNA target sequence. The Cas endonuclease unwinds the DNA duplex in close proximity of the genomic target site and cleaves both DNA strands upon recognition of a target sequence by a guide RNA, but only if the correct protospacer-adjacent motif (PAM) is approximately oriented at the 3′ end of the target sequence

[0094] In one embodiment, the Cas endonuclease gene is a Cas9 endonuclease, such as but not limited to, Cas9 genes listed in SEQ ID NOS: 462, 474, 489, 494, 499, 505 and 518 of International Patent Application Number WO 2007/024097, published Mar. 1, 2007, and incorporated herein by reference. In another embodiment, the Cas endonuclease gene is plant, maize or soybean optimized Cas9 endonuclease. In another embodiment, the Cas endonuclease gene is operably linked to a SV40 nuclear targeting signal upstream of the Cas codon region and a bipartite VirD2 nuclear localization signal (Tinland, et al., (1992) Proc. Natl. Acad. Sci. USA 89:7442-6) downstream of the Cas codon region.

[0095] In one embodiment, the Cas endonuclease gene is a plant codon optimized streptococcus pyogenes Cas9 gene that can recognize any genomic sequence of the form N(12-30)NGG can in principle be targeted.

[0096] Endonucleases are enzymes that cleave the phosphodiester bond within a polynucleotide chain, and include restriction endonucleases that cleave DNA at specific sites without damaging the bases. Restriction endonucleases include Type I, Type II, Type III and Type IV endonucleases, which further include subtypes. In the Type I and Type III systems, both the methylase and restriction activities are contained in a single complex. Endonucleases also include meganucleases, also known as homing endonucleases (HEases), which like restriction endonucleases, bind and cut at a specific recognition site, however the recognition sites for meganucleases are typically longer, about 18 by or more (International Patent Application Number PCT/US12/30061 filed on Mar. 22, 2012). Meganucleases have been classified into four families based on conserved sequence motifs, the families are the LAGLIDADG, GIY-YIG, H-N-H and His-Cys box families. These motifs participate in the coordination of metal ions and hydrolysis of phosphodiester bonds. HEases are notable for their long recognition sites and for tolerating some sequence polymorphisms in their DNA substrates. The naming convention for meganuclease is similar to the convention for other restriction endonuclease. Meganucleases are also characterized by prefix F-, I-, or PI- for enzymes encoded by free-standing ORFs, introns, and inteins, respectively. One step in the recombination process involves polynucleotide cleavage at or near the recognition site. This cleaving activity can be used to produce a double-strand break. For reviews of site-specific recombinases and their recognition sites, see, Sauer, (1994) Curr Op Biotechnol 5:521-7 and Sadowski, (1993) FASEB 7:760-7. In some examples the recombinase is from the Integrase or Resolvase families.

[0097] TAL effector nucleases are a new class of sequence-specific nucleases that can be used to make double-strand breaks at specific target sequences in the genome of a plant or other organism. TAL effector nucleases are created by fusing a native or engineered transcription activator-like (TAL) effector, or functional part thereof, to the catalytic domain of an endonuclease, such as, for example, Fokl. The unique, modular TAL effector DNA binding domain allows for the design of proteins with potentially any given DNA recognition specificity (Miller, et al., (2011) Nature Biotechnology 29:143-148). Zinc finger nucleases (ZFNs) are engineered double-strand break inducing agents comprised of a zinc finger DNA binding domain and a double-strand-break-inducing agent domain. Recognition site specificity is conferred by the zinc finger domain, which typically comprising two, three or four zinc fingers, for example having a C2H2 structure, however other zinc finger structures are known and have been engineered. Zinc finger domains are amenable for designing polypeptides which specifically bind a selected polynucleotide recognition sequence. ZFNs consist of an engineered DNA-binding zinc finger domain linked to a non-specific endonuclease domain, for example nuclease domain from a Type IIs endonuclease such as Fokl. Additional functionalities can be fused to the zinc-finger binding domain, including transcriptional activator domains, transcription repressor domains, and methylases. In some examples, dimerization of nuclease domain is required for cleavage activity. Each zinc finger recognizes three consecutive base pairs in the target DNA. For example, a 3 finger domain recognized a sequence of 9 contiguous nucleotides, with a dimerization requirement of the nuclease, two sets of zinc finger triplets are used to bind a 18 nucleotide recognition sequence.

[0098] (3) Guide RNA/Cas Endonuclease System

[0099] Bacteria and archaea have evolved adaptive immune defenses termed clustered regularly interspaced short palindromic repeats (CRISPR)/CRISPR-associated (Cas) systems that use short RNA to direct degradation of foreign nucleic acids (Prashant Mali et al., RNA-Guided Human Genome Engineering via Cas9 Science 339,823 (2013),). The type II CRISPR/Cas system from bacteria employs a crRNA and tracrRNA to guide the Cas endonuclease to its DNA target. The crRNA (CRISPR RNA) contains the region complementary to the DNA target and base pairs with the tracrRNA (trans-activating CRISPR RNA) forming a RNA duplex that directs the Cas endonuclease to cleave the DNA target.

[0100] As used herein, the term “guide RNA” refers to a synthetic fusion of two RNA molecules, a crRNA (CRISPR RNA) comprising a variable targeting domain, and a tracrRNA

[0101] The term “variable targeting domain” refers to a 12 to 30 nucleotide sequence 5-prime of the GUUUU sequence motif in the guide RNA that is complementary to a DNA target site in the genome of a plant cell, plant or seed.

[0102] In one embodiment of the invention the variable target domain is 12, 13, 14, 15, 15, 16, 17, 18, 19, 20, 21, 22, 23, 24, 25, 26, 27, 28, 29 or 30 nucleotides in length.

[0103] In one embodiment of the disclosure, the guide RNA comprises a cRNA and a tracrRNA of the type II CRISPR/Cas system that can form a complex with a type II Cas endonuclease, wherein said guide RNA/Cas endonuclease complex can direct the Cas endonuclease to a plant genomic target site, enabling the Cas endonuclease to introduce a double strand break into the genomic target site.

[0104] In one embodiment the guide RNA can be introduce into the plant cell directly using particle bombardment.

[0105] In another embodiment the guide RNA can be introduced indirectly by introducing a recombinant DNA molecule comprising the corresponding guide DNA sequence operably linked to a plant specific promoter that is capable of transcribing the guide RNA in said plant cell. The term “corresponding guide DNA” refers to a DNA molecule that is identical to the RNA molecule but has a “T” substituted for each “U” of the RNA molecule.

[0106] In some embodiments, the guide RNA is introduced via particle bombardment or Agrobacterium transformation of a recombinant DNA construct comprising the corresponding guide DNA operably linked to a plant U6 polymerase III promoter.

[0107] In one embodiment, the RNA that guides the RNA/Cas9 endonuclease complex: is a duplexed RNA comprising a duplex crRNA-tracrRNA. One advantage of using a guide RNA versus a duplexed crRNA-tracrRNA is that only one expression cassette needs to be made to express the fused guide RNA.

### III. Target Sites for Cas Endonucleases

[0108] The terms “target site”, “target sequence”, “target DNA”, “target locus”, “genomic target site”, “genomic target sequence” and “genomic target locus” are used interchangeably herein and refer to a polynucleotide sequence in the genome (including choloroplastic and mitochondrial DNA) of a plant cell at which a double-strand break is induced in the plant cell genome by a Cas endonuclease. The target site can be an endogenous site in the plant genome, or alternatively, the target site can be heterologous to the plant and thereby not be naturally occurring in the genome, or the target site can be found in a heterologous genomic location compared to where it occurs in nature. As used herein, terms “endogenous target sequence” and “native target sequence” are used interchangeable herein to refer to a target sequence that is endogenous or native to the genome of a plant and is at the endogenous or native position of that target sequence in the genome of the plant.

[0109] In one embodiments, the target site can be similar to a DNA recognition site or target site that that is specifically recognized and/or bound by a double-strand break inducing agent such as a LIG3-4 endonuclease (US Patent Application Publication Number 2009/0133152 A1, published May 21, 2009) or a MS26++meganuclease (U.S. patent application Ser. No. 13/526,912, filed Jun. 19, 2012).

[0110] An “artificial target site” or “artificial target sequence” are used interchangeably herein and refer to a target sequence that has been introduced into the genome of a plant. Such an artificial target sequence can be identical in sequence to an endogenous or native target sequence in the genome of a plant but be located in a different position (i.e., a non-endogenous or non-native position) in the genome of a plant.

[0111] An “altered target site”, “altered target sequence”, “modified target site”, “modified target sequence” are used interchangeably herein and refer to a target sequence as disclosed herein that comprises at least one alteration when compared to non-altered target sequence. Such “alterations” include, for example: (i) replacement of at least one nucleotide, (ii) a deletion of at least one nucleotide, (iii) an insertion of at least one nucleotide or (iv) any combination of (i)-(iii).

[0112] Methods for modifying a plant genomic target site are disclosed herein. In one embodiment, a method for modifying a target site in the genome of a plant cell comprises introducing a guide RNA into a plant cell having a Cas endonuclease, wherein said guide RNA and Cas endonuclease are capable of forming a complex that enables the Cas endonuclease to introduce a double strand break at said target site, wherein said guide RNA comprises a variable targeting domain that is complementary to said target site.

[0113] Also provided is a method for modifying a target site in the genome of a plant cell, the method comprising introducing a guide RNA and a Cas endonuclease into said plant, wherein said guide RNA and Cas endonuclease are capable of forming a complex that enables the Cas endonuclease to introduce a double strand break at said target site, wherein said guide RNA comprises a variable targeting domain that is complementary to said target site.

[0114] Further provided is a method for modifying a target site in the genome of a plant cell, the method comprising introducing a guide RNA and a donor DNA into a plant cell having a Cas endonuclease, wherein said guide RNA and Cas endonuclease are capable of forming a complex that enables the Cas endonuclease to introduce a double strand break at said target site, wherein said guide RNA comprises a variable targeting domain that is complementary to said target site, wherein said donor DNA comprises a polynucleotide of interest.

[0115] Further provided is a method for modifying a target site in the genome of a plant cell, the method comprising: a) introducing into a plant cell a guide RNA comprising a variable targeting domain that is complementary to said target site and a Cas endonuclease, wherein said guide RNA and Cas endonuclease are capable of forming a complex that enables the Cas endonuclease to introduce a double strand break at said target site and b) identifying at least one plant cell that has a modification at said target, wherein the modification includes at least one deletion or substitution of one or more nucleotides in said target site.

[0116] Further provided, a method for modifying a target DNA sequence in the genome of a plant cell, the method comprising: a) introducing into a plant cell a first recombinant DNA construct capable of expressing a guide RNA and a second recombinant DNA construct capable of expressing a Cas endonuclease, wherein said guide RNA and Cas endonuclease are capable of forming a complex that enables the Cas endonuclease to introduce a double strand break at said target site and b) identifying at least one plant cell that has a modification at said target, wherein the modification includes at least one deletion or substitution of one or more nucleotides in said target site.

[0117] The length of the target site can vary, and includes, for example, target sites that are at least 12, 13, 14, 15, 16, 17, 18, 19, 20, 21, 22, 23, 24, 25, 26, 27, 28, 29, 30 or more nucleotides in length. It is further possible that the target site can be palindromic, that is, the sequence on one strand reads the same in the opposite direction on the complementary strand. The nick/cleavage site can be within the target sequence or the nick/cleavage site could be outside of the target sequence. In another variation, the cleavage could occur at nucleotide positions immediately opposite each other to produce a blunt end cut or, in other Cases, the incisions could be staggered to produce single-stranded overhangs, also called “sticky ends”, which can be either 5′ overhangs, or 3′ overhangs.

[0118] Active variants of genomic target sites can also be used. Such active variants can comprise at least 65%, 70%, 75%, 80%, 85%, 90%, 91%, 92%, 93%, 94%, 95%, 96%, 97%, 98%, 99% or more sequence identity to the given target site, wherein the active variants retain biological activity and hence are capable of being recognized and cleaved by an Cas endonuclease. Assays to measure the double-strand break of a target site by an endonuclease are known in the art and generally measure the overall activity and specificity of the agent on DNA substrates containing recognition sites.

[0119] B. Transactivator elements

[0120] Transactivator elements are provided herein for use in regulating the expression of genes of interest by selectively activating inducible promoters. For example, the polynucleotides encoding transactivator proteins of the invention can be placed under the control of a constitutive, tissue-specific, or other transactivator-inducible promoter to control the expression of a nucleotide of interest operably linked to a transactivator-inducible promoter. In some embodiments, a polynucleotide encoding a transactivator protein can be provided on an expression cassette in a separate plant from the expression or suppression cassette comprising the corresponding transactivator-inducible promoter. Expression cassettes provided herein comprising polynucleotides encoding transactivator proteins can further comprise operably linked promoters that drive expression of the transactivator in a plant. As used herein, “transactivator A” and “transactivator B” refer to any transactivator element used for regulating the expression of genes of interest by selectively activating inducible promoters. Examples of transactivators include the GAL4DBD-VP16/UAS PRO system, the T7 polymerase/T7 PRO system and the LexA transactivator system commonly known in the art, or any combination thereof, (Yagi, et al., (2010) Proc. Natl. Acad. Sci. 107(37):16166-16171).

[0121] As used herein, “transactivator promoter” refers to a promoter operably linked to a polynucleotide encoding a transactivator. In specific embodiments, expression cassettes are provided encoding a polynucleotide encoding a transactivator operably linked to a constitutive or tissue-specific promoter. For example, the tissue-specific promoter operably linked to a polynucleotide encoding a transactivator can be an ovule-specific promoter wherein the transactivator is specifically expressed in the ovule of a plant. Such a transactivator specifically expressed in the ovule of a plant can activate the corresponding transactivator-inducible promoter resulting in the expression of a gene of interest only in the ovule. In one embodiment of the invention, a first plant comprising an expression cassette comprising a polynucleotide encoding transactivator A operably linked to an ovule-specific promoter is crossed with a second plant comprising a suppression cassette comprising a CENH3 silencing element operably linked to a transactivator A-inducible promoter. In the resulting progeny plant, the CENH3 silencing element is specifically expressed in the ovule.

[0122] In another embodiment of the invention, a first plant comprising an expression cassette comprising a polynucleotide encoding transactivator B under the control of a constitutive promoter is crossed with a second plant comprising a suppression cassette comprising a MiMe silencing element under the control of a transactivator-inducible promoter. In progeny from the resulting cross, the transactivator activates constitutive expression of the MiMe silencing element. In certain embodiments, an expression cassette comprising a polynucleotide encoding transactivator A is provided in the same plant as a suppression cassette comprising a transactivator B-inducible promoter, wherein transactivator A does not activate the expression of the transactivator B-inducible promoter.

[0123] C. Expression Cassettes and Suppression Cassettes

[0124] Compositions of the invention also encompass expression cassettes and suppression cassettes. It is recognized that the polynucleotides and silencing elements of the invention can be provided in expression cassettes and suppression cassettes, respectively, for expression in a plant of interest. Expression cassettes provided herein may comprise, for example, polynucleotides encoding a transactivator, an active CENH3 mutant, and/or wild-type CENH3, or fragments or variants thereof. Suppression cassettes provided herein may, for example, comprise a silencing element as described herein above.

[0125] The expression and suppression cassettes of the invention can include 5′ and 3′ regulatory sequences operably linked to the polynucleotide or silencing elements of the invention. “Operably linked” is intended to mean a functional linkage between two or more elements. For example, an operable linkage between a polynucleotide and a regulatory sequence (i.e., a promoter) is a functional link that allows for expression of the polynucleotide of the invention. In particular examples, a polynucleotide or silencing element of the invention can be operably linked to a promoter that drives expression in a plant. Operably linked elements may be contiguous or non-contiguous. When used to refer to the joining of two protein coding regions, by operably linked is intended that the coding regions are in the same reading frame. The cassette may additionally contain at least one additional polynucleotide to be cotransformed into the organism. Alternatively, the additional polypeptide(s) can be provided on multiple expression cassettes. Expression and suppression cassettes can be provided with a plurality of restriction sites and/or recombination sites for insertion of the polynucleotide to be under the transcriptional regulation of the regulatory regions. The expression and suppression cassettes may additionally contain selectable marker genes.

[0126] The expression and suppression cassettes can include in the 5′-3′ direction of transcription, a transcriptional and translational initiation region (i.e., a promoter), a polynucleotide encoding a polypeptide or the silencing element(s) employed in the methods and compositions of the invention, and a transcriptional and translational termination region (i.e., termination region) functional in plants. In those embodiments, where the suppression cassettes encode double stranded RNA the suppression cassette can comprise two convergent promoters that drive transcription of the operably linked silencing element. “Convergent promoters” refers to promoters that are oriented on either terminus of the operably linked silencing element such that each promoter drives transcription of the silencing element in opposite directions, yielding two transcripts. In such embodiments, the convergent promoters allow for the transcription of the sense and anti-sense strand and thus allow for the formation of a dsRNA.

[0127] The regulatory regions (i.e., promoters, transcriptional regulatory regions and translational termination regions) and/or the polynucleotides or silencing elements employed in the invention may be native/analogous to the host cell or to each other. Alternatively, the regulatory regions and/or the polynucleotides or silencing elements employed in the invention may be heterologous to the host cell or to each other. As used herein, “heterologous” in reference to a sequence is a sequence that originates from a foreign species, or, if from the same species, is substantially modified from its native form in composition and/or genomic locus by deliberate human intervention. For example, a promoter operably linked to a heterologous polynucleotide is from a species different from the species from which the polynucleotide was derived, or, if from the same/analogous species, one or both are substantially modified from their original form and/or genomic locus, or the promoter is not the native promoter for the operably linked polynucleotide. As used herein, a chimeric gene comprises a coding sequence operably linked to a transcription initiation region that is heterologous to the coding sequence.

[0128] The termination region may be native with the transcriptional initiation region, may be native with the operably linked polynucleotide encoding a polypeptide or silencing element, may be native with the plant host, or may be derived from another source (i.e., foreign or heterologous) to the promoter, the polynucleotide, the silencing element, the plant host, or any combination thereof. Convenient termination regions are available from the Ti-plasmid of A. tumefaciens, such as the octopine synthase and nopaline synthase termination regions. See also, Guerineau, et al., (1991) Mol. Gen. Genet. 262:141-144; Proudfoot, (1991) Cell 64:671-674; Sanfacon, et al., (1991) Genes Dev. 5:141-149; Mogen, et al., (1990) Plant Cell 2:1261-1272; Munroe, et al., (1990) Gene 91:151-158; Ballas, et al., (1989) Nucleic Acids Res. 17:7891-7903 and Joshi, et al., (1987) Nucleic Acids Res. 15:9627-9639.

[0129] Additional sequence modifications are known to enhance gene expression in a cellular host. These include elimination of sequences encoding spurious polyadenylation signals, exon-intron splice site signals, transposon-like repeats and other such well-characterized sequences that may be deleterious to gene expression. The G-C content of the sequence may be adjusted to levels average for a given cellular host, as calculated by reference to known genes expressed in the host cell. When possible, the sequence is modified to avoid predicted hairpin secondary mRNA structures.

[0130] In preparing the expression or suppression cassettes of the invention, various DNA fragments may be manipulated, so as to provide for the DNA sequences in the proper orientation and, as appropriate, in the proper reading frame. Toward this end, adapters or linkers may be employed to join the DNA fragments or other manipulations may be involved to provide for convenient restriction sites, removal of superfluous DNA, removal of restriction sites, or the like. For this purpose, in vitro mutagenesis, primer repair, restriction, annealing, resubstitutions, e.g., transitions and transversions, may be involved.

[0131] In particular embodiments, the silencing element of a suppression cassette may be operably linked to a promoter that drives expression of the silencing element in a plant. In other embodiments, polynucleotides encoding an active CENH3 mutant, wild-type CENH3 or transactivator of an expression cassette may be operably linked to a promoter that drives expression of the polynucleotide in a plant. It is recognized that a number of promoters can be used in the practice of the invention. Polynucleotides encoding silencing elements can be combined with constitutive, tissue-preferred, transactivator-inducible or other promoters for expression in plants.

[0132] Such constitutive promoters include, for example, the core promoter of the Rsyn7 promoter and other constitutive promoters disclosed in WO 1999/43838 and U.S. Pat. No. 6,072,050; the core CaMV 35S promoter (Odell, et al., (1985) Nature 313:810-812); rice actin (McElroy, et al., (1990) Plant Cell 2:163-171); ubiquitin (Christensen, et al., (1989) Plant Mol. Biol. 12:619-632 and Christensen, et al., (1992) Plant Mol. Biol. 18:675-689); pEMU (Last, et al., (1991) Theor. Appl. Genet. 81:581-588); MAS (Velten, et al., (1984) EMBO J. 3:2723-2730); ALS promoter (U.S. Pat. No. 5,659,026) and the like. Other constitutive promoters include, for example, U.S. Pat. Nos. 5,608,149; 5,608,144; 5,604,121; 5,569,597; 5,466,785; 5,399,680; 5,268,463; 5,608,142 and 6,177,611.

[0133] An inducible promoter, for instance, a transactivator-inducible promoter are provided. For example, transactivator-inducible promoters for use in the expression or suppression cassettes disclosed herein include: GaI4DBD::VP16/UAS; GaI4DBD::hypothetical activator domain/UAS; T7 Polymerase/T7 promoter; other proprietary systems; in theory: unique DNA binding domain::activation domain/DNA recognition element::minimal promoter element as demonstrated in numerous novel fusions in plant transient experimental systems.

[0134] Chemical-regulated promoters can be used to modulate the expression of a gene in a plant through the application of an exogenous chemical regulator. Depending upon the objective, the promoter may be a chemical-inducible promoter, where application of the chemical induces gene expression, or a chemical-repressible promoter, where application of the chemical represses gene expression. Chemical-inducible promoters are known in the art and include, but are not limited to, the maize In2-2 promoter, which is activated by benzenesulfonamide herbicide safeners, the maize GST promoter, which is activated by hydrophobic electrophilic compounds that are used as pre-emergent herbicides, and the tobacco PR-1a promoter, which is activated by salicylic acid. Other chemical-regulated promoters of interest include steroid-responsive promoters (see, for example, the glucocorticoid-inducible promoter in Schena, et al., (1991) Proc. Natl. Acad. Sci. USA 88:10421-10425 and McNellis, et al., (1998) Plant J. 14(2):247-257) and tetracycline-inducible and tetracycline-repressible promoters (see, for example, Gatz, et al., (1991) Mol. Gen. Genet. 227:229-237 and U.S. Pat. Nos. 5,814,618 and 5,789,156), herein incorporated by reference.

[0135] Tissue-preferred promoters can be utilized to target enhanced expression within a particular plant tissue. Tissue-preferred promoters include Yamamoto, et al., (1997) Plant J. 12(2):255-265; Kawamata, et al., (1997) Plant Cell Physiol. 38(7):792-803; Hansen, et al., (1997) Mol. Gen Genet. 254(3):337-343; Russell, et al., (1997) Transgenic Res. 6(2):157-168; Rinehart, et al., (1996) Plant Physiol. 112(3):1331-1341; Van Camp, et al., (1996) Plant Physiol. 112(2):525-535; Canevascini, et al., (1996) Plant Physiol. 112(2):513-524; Yamamoto, et al., (1994) Plant Cell Physiol. 35(5):773-778; Lam, (1994) Results Probl. Cell Differ. 20:181-196; Orozco, et al., (1993) Plant Mol Biol. 23(6):1129-1138; Matsuoka, et al., (1993) Proc Natl. Acad. Sci. USA 90(20):9586-9590 and Guevara-Garcia, et al., (1993) Plant J. 4(3):495-505. Such promoters can be modified, if necessary, for weak expression.

[0136] Egg and central cell-specific promoters and central cell-specific promoters can be utilized to confine expression of silencing elements, active CENH3 mutants, or wild-type CENH3 to the central cell of a plant. For example, AT-DD45 PRO, AT-RKD1 PRO or AT-RKD2 PRO can be used as egg cell-specific promoters. The egg and central cell-specific MEA (FIS1) and FIS2 promoters are also useful reproductive tissue-specific promoters (Luo, et al., (2000) Proc. Natl. Acad. Sci. USA 97:10637-10642; Vielle-Calzada, et al., (1999) Genes Dev. 13:2971-2982). The central cell specific promoter. Other examples of egg cell and central cell-specific promoters can be found, for example, in Steffen, et al., (2007) Plant J 51: 281-292 and Ohnishi, et al., (2011) Plant Physiology 155:881-891, herein incorporated by reference in their entirety. For example, central cell specific promoters from Steffen, et al., can be used, including, for example, AT-DD7 PRO, AT-DD9 PRO, AT-DD22 PRO, AT-DD25 PRO, AT-DD36 PRO, AT-DD41 PRO, AT-DD66 PRO and AT-DD65 PRO.

[0137] Ovule-specific promoters are known and can be selected for ovule-specific expression of polynucleotides disclosed elsewhere herein. For example, ovule-specific promoters can drive expression of transactivators or active CENH3 mutants in the entire ovule, including, but not limited to the egg cell and central cell. The ovule-specific promoter for BEL1 gene can also be used (Reiser, et al., (1995) Cell 83:735-742; GenBank Accession Number U39944; Ray, et al, (1994) Proc. Natl. Acad. Sci. USA 91:5761-5765) as well as those disclosed in U.S. patent application Ser. No. 12/912,231, filed Oct. 26, 2010, herein incorporated by reference in its entirety.

[0138] Possible promoters also include the Black Cherry promoter for Prunasin Hydrolase (PH DL1.4 PRO) (U.S. Pat. No. 6,797,859), Thioredoxin H promoter from cucumber and rice (Fukuda, et al., (2005). Plant Cell Physiol. 46(11):1779-86), Rice (RSs1) (Shi, et al., (1994). J. Exp. Bot. 45(274):623-631) and maize sucrose synthese -1 promoters (Yang, et al., (1990) PNAS 87:4144-4148), PP2 promoter from pumpkin Guo, et al., (2004) Transgenic Research 13:559-566), At SUC2 promoter (Truernit, et al., (1995) Planta 196(3):564-70, At SAM-1 (S-adenosylmethionine synthetase) (Mijnsbrugge, et al., (1996) Plant. Cell. Physiol. 37(8):1108-1115) and the Rice tungro bacilliform virus (RTBV) promoter (Bhattacharyya-Pakrasi, et al., (1993) Plant J. 4(1):71-79).

[0139] The expression cassette can also comprise a selectable marker gene for the selection of transformed cells. Selectable marker genes are utilized for the selection of transformed cells or tissues. Marker genes include genes encoding antibiotic resistance, such as those encoding neomycin phosphotransferase II (NEO) and hygromycin phosphotransferase (HPT), as well as genes conferring resistance to herbicidal compounds, such as glufosinate ammonium, bromoxynil, imidazolinones and 2,4-dichlorophenoxyacetate (2,4-D). Additional selectable markers include phenotypic markers such as β-galactosidase and fluorescent proteins such as green fluorescent protein (GFP) (Su, et al., (2004) Biotechnol Bioeng 85:610-9 and Fetter, et al., (2004) Plant Cell 16:215-28), cyan florescent protein (CYP) (Bolte, et al., (2004) J. Cell Science 117:943-54 and Kato, et al., (2002) Plant Physiol 129:913-42) and yellow florescent protein (PhiYFP™ from Evrogen, see, Bolte, et al., (2004) J. Cell Science 117:943-54). For additional selectable markers, see generally, Yarranton, (1992) Curr. Opin. Biotech. 3:506-511; Christopherson, et al., (1992) Proc. Natl. Acad. Sci. USA 89:6314-6318; Yao, et al., (1992) Cell 71:63-72; Reznikoff, (1992) Mol. Microbiol. 6:2419-2422; Barkley, et al., (1980) in The Operon, pp. 177-220; Hu, et al., (1987) Cell 48:555-566; Brown, et al., (1987) Cell 49:603-612; Figge, et al., (1988) Cell 52:713-722; Deuschle, et al., (1989) Proc. Natl. Acad. Sci. USA 86:5400-5404; Fuerst, et al., (1989) Proc. Natl. Acad. Sci. USA 86:2549-2553; Deuschle, et al., (1990) Science 248:480-483; Gossen, (1993) Ph.D. Thesis, University of Heidelberg; Reines, et al., (1993) Proc. Natl. Acad. Sci. USA 90:1917-1921; Labow, et al., (1990) Mol. Cell. Biol. 10:3343-3356; Zambretti, et al., (1992) Proc. Natl. Acad. Sci. USA 89:3952-3956; Baim, et al., (1991) Proc. Natl. Acad. Sci. USA 88:5072-5076; Wyborski, et al., (1991) Nucleic Acids Res. 19:4647-4653; Hillenand-Wissman, (1989) Topics Mol. Struc. Biol. 10:143-162; Degenkolb, et al., (1991) Antimicrob. Agents Chemother. 35:1591-1595; Kleinschnidt, et al., (1988) Biochemistry 27:1094-1104; Bonin, (1993) Ph.D. Thesis, University of Heidelberg; Gossen, et al., (1992) Proc. Natl. Acad. Sci. USA 89:5547-5551; Oliva, et al., (1992) Antimicrob. Agents Chemother. 36:913-919; Hlavka, et al., (1985) Handbook of Experimental Pharmacology, Vol. 78 (Springer-Verlag, Berlin); Gill, et al., (1988) Nature 334:721-724. Such disclosures are herein incorporated by reference. The above list of selectable marker genes is not meant to be limiting. Any selectable marker gene can be used in the present invention.

[0140] D. Fragments and Variants

[0141] The expression and suppression cassettes of the invention can be designed based on the naturally occurring CENH3, Spo11-1, Rec8 or OSd1 polynucleotides or fragments or variants thereof. By “fragment” is intended a portion of the nucleotide sequence. Fragments of the disclosed nucleotide sequences may range from at least about 10, 16, 20, 50, 75, 100, 150, 200, 250, 300, 350, 400, 450 or 500 contiguous nucleotides, or up to the number of nucleotides present in a full-length CENH3, Spo11-1, Rec8 or OSd1 polynucleotide disclosed herein (for example, 1089 nucleotides for SEQ ID NO: 2) so long as the fragment achieves the desired objective, i.e., expression of a biologically active polypeptide of interest (for example, the active CENH3 mutant or CENH3 polypeptide) or expression of a functional silencing element that suppresses expression or function of the CENH3, Spo11-1, Rec8 or OSd1 polypeptide.

[0142] By “variants” is intended to mean substantially similar sequences. For polynucleotides, a variant comprises a deletion and/or addition of one or more nucleotides at one or more internal sites within the native polynucleotide and/or a substitution of one or more nucleotides at one or more sites in the native polynucleotide. As used herein, a “native” polynucleotide comprises a naturally occurring nucleotide sequence, for example, a naturally occurring CENH3, Spo11-1, Rec8 or OSd1 polynucleotide. For polynucleotides, naturally occurring variants can be identified with the use of well-known molecular biology techniques such as, for example, polymerase chain reaction (PCR) and hybridization techniques as outlined elsewhere herein. Variant polynucleotides also include synthetically derived polynucleotides, such as those generated, for example, by using site-directed mutagenesis. Generally, variants of a particular polynucleotide of the invention will have at least about 40%, 45%, 50%, 55%, 60%, 65%, 70%, 75%, 80%, 85%, 90%, 91%, 92%, 93%, 94%, 95%, 96%, 97%, 98%, 99% or more sequence identity to that particular polynucleotide as determined by sequence alignment programs and parameters commonly known in the art.

[0143] In particular embodiments, a silencing element of the invention may comprise the full-length nucleotide sequence of SEQ ID NOS: 2, 3, 4 and/or 5 or a fragment of the nucleotide sequence of SEQ ID NOS: 2, 3, 4 and/or 5. Additionally, silencing elements of the invention may comprise a variant of the full-length nucleotide sequence of SEQ ID NOS: 2, 3, 4 and/or 5 or a variant of a fragment of the nucleotide sequence of SEQ ID NOS: 2, 3, 4 and/or 5. Such variants will maintain at least 80% sequence identity to the nucleotide sequence of the native full-length sequence or fragment from which the variant is derived. It is recognized that the CENH3 and active CENH3 mutants can be altered in various ways including amino acid substitutions, deletions, truncations, and insertions. Methods for such manipulations are generally known in the art. Nucleotide sequence variants and fragments of the CENH3,

[0144] Rec8 or OSd1 gene can be prepared by mutations in the DNA. Methods for mutagenesis and polynucleotide alterations are well known in the art. See, for example, Kunkel, (1985) Proc. Natl. Acad. Sci. USA 82:488-492; Kunkel, et al., (1987) Methods in Enzymol. 154:367-382; U.S. Pat. No. 4,873,192; Walker and Gaastra, eds. (1983) Techniques in Molecular Biology (MacMillan Publishing Company, New York) and the references cited therein.

[0145] Thus, the expression and suppression cassettes can be based on the naturally occurring nucleotide sequences as well as variations and modified forms thereof. Such variants will continue to possess the desired activity. Obviously, where a functional polypeptide is to be expressed, the mutations that will be made in the DNA encoding the variant polypeptide must not place the sequence out of reading frame and optimally will not create complementary regions that could produce secondary mRNA structure. See, EP Patent Application Publication Number 75,444.

[0146] The deletions, insertions and substitutions of the encoded polypeptides encompassed herein are not expected to produce radical changes in the characteristics of the protein. However, when it is difficult to predict the exact effect of the substitution, deletion or insertion in advance of doing so, one skilled in the art will appreciate that the effect will be evaluated by routine screening assays. Deletions, insertions and substitutions within a polynucleotide of interest are made such that the variant polynucleotide retains the desired activity, i.e., encoding a functional CENH3 variant, or encoding a functional silencing element that effectively suppresses expression or function of the CENH3, Spo11-1, Rec8 or OSd1 polypeptide. In an inbred situation, analyses of protein functionality would be best done through cytogenetic evaluations, i.e. microscopy of meiotic stages and resultant products. Mis-function of these proteins would have impacts on fertility and offspring health (across reasonable numbers of plants) which would be in most cases readily noticed. In crosses between differing genetic backgrounds, molecular markers could be used to assess recombination and segregation.

### III. Plants

[0147] Plants, plant cells, plant parts and seeds and grain comprising one or more of the expression cassettes and suppression cassettes described elsewhere herein are provided. In specific embodiments, the plants and/or plant parts comprise stably incorporated in the genome at least one transactivator expression cassette, at least one active CENH3 mutant expression cassette, at least one wild-type CENH3 expression cassette, at least one MiMe suppression cassette, and/or at least one wild-type CENH3 suppression cassette. Thus, the invention provides plants, plant cells, plant parts and seed that have stably incorporated into their genome a transactivator A expression cassette, an active CENH3 mutant expression cassette and a MiMe suppression cassette. Further provided are plants, plant cells, plant parts and seeds that have stably incorporated into their genome a transactivator B expression cassette, a wild-type CENH3 expression cassette and a wild-type CENH3 suppression cassette. In specific embodiments, progeny plants are provided resulting from the cross of a plant having stably incorporated into the genome a transactivator A expression cassette, an active CENH3 mutant expression cassette and a MiMe suppression cassette with a plant having stably incorporated into the genome a transactivator B expression cassette, a wild-type CENH3 expression cassette and a wild-type CENH3 suppression cassette wherein the progeny plant is a self-reproducing hybrid plant. Such self-reproducing hybrid progeny plants comprise at least one transactivator expression cassette, at least one active CENH3 mutant expression cassette, at least one wild-type CENH3 expression cassette, at least one MiMe suppression cassette and/or at least one wild-type CENH3 suppression cassette.

[0148] In specific embodiments, plants and seeds are provided comprising a suppression cassette comprising a MiMe silencing element operably linked to a transactivator B-inducible promoter, an expression cassette comprising a polynucleotide encoding an active CENH3 mutant operably linked to an ovule-specific promoter, and an expression cassette comprising a polynucleotide encoding a transactivator A operably linked to an ovule-specific promoter. In other embodiments, plants and seeds are provided comprising a suppression cassette comprising a wild-type CENH3 silencing element operably linked to a transactivator A-inducible promoter, an expression cassette comprising a polynucleotide encoding a wild-type CENH3 polypeptide operably linked to an egg-cell specific promoter, and an expression cassette comprising a polynucleotide encoding a transactivator B operably linked to a promoter.

[0149] As used herein, the term plant includes plant cells, plant protoplasts, plant cell tissue cultures from which plants can be regenerated, plant calli, plant clumps, and plant cells that are intact in plants or parts of plants such as embryos, pollen, ovules, seeds, leaves, flowers, branches, fruit, kernels, ears, cobs, husks, stalks, roots, root tips, anthers and the like. Grain is intended to mean the mature seed produced by commercial growers for purposes other than growing or reproducing the species. Progeny, variants and mutants of the regenerated plants are also included within the scope of the invention, provided that these parts comprise the introduced polynucleotides.

[0150] The expression cassettes and suppression cassettes disclosed herein may be used for transformation of any plant species, including, but not limited to, monocots and dicots. Examples of plant species of interest include, but are not limited to, corn (Zea mays), Brassica sp. (e.g., B. napus, B. rapa, B. juncea), particularly those Brassica species useful as sources of seed oil, alfalfa (Medicago sativa), rice (Oryza sativa), rye (Secale cereale), sorghum (Sorghum bicolor, Sorghum vulgare), millet (e.g., pearl millet (Pennisetum glaucum), proso millet (Panicum miliaceum), foxtail millet (Setaria italica), finger millet (Eleusine coracana)), sunflower (Helianthus annuus), safflower (Carthamus tinctorius), wheat (Triticum aestivum), soybean (Glycine max), tobacco (Nicotiana tabacum), potato (Solanum tuberosum), peanuts (Arachis hypogaea), cotton (Gossypium barbadense, Gossypium hirsutum), sweet potato (Ipomoea batatus), cassava (Manihot esculenta), coffee (Coffea spp.), coconut (Cocos nucifera), pineapple (Ananas comosus), citrus trees (Citrus spp.), cocoa (Theobroma cacao), tea (Camellia sinensis), banana (Musa spp.), avocado (Persea americana), fig (Ficus casica), guava (Psidium guajava), mango (Mangifera indica), olive (Olea europaea), papaya (Carica papaya), cashew (Anacardium occidentale), macadamia (Macadamia integrifolia), almond (Prunus amygdalus), sugar beets (Beta vulgaris), sugarcane (Saccharum spp.), oats, barley, vegetables, ornamentals, and conifers.

[0151] Vegetables include tomatoes (Lycopersicon esculentum), lettuce (e.g., Lactuca sativa), green beans (Phaseolus vulgaris), lima beans (Phaseolus limensis), peas (Lathyrus spp.), and members of the genus Cucumis such as cucumber (C. sativus), cantaloupe (C. cantalupensis), and musk melon (C. melo). Ornamentals include azalea (Rhododendron spp.), hydrangea (Macrophylla hydrangea), hibiscus (Hibiscus rosasanensis), roses (Rosa spp.), tulips (Tulipa spp.), daffodils (Narcissus spp.), petunias (Petunia hybrida), carnation (Dianthus caryophyllus), poinsettia (Euphorbia pulcherrima), and chrysanthemum.

[0152] Conifers that may be employed in practicing the present invention include, for example, pines such as loblolly pine (Pinus taeda), slash pine (Pinus ellioth), ponderosa pine (Pinus ponderosa), lodgepole pine (Pinus contorta), and Monterey pine (Pinus radiata); Douglas-fir (Pseudotsuga menziesii); Western hemlock (Tsuga canadensis); Sitka spruce (Picea glauca); redwood (Sequoia sempervirens); true firs such as silver fir (Abies amabilis) and balsam fir (Abies balsamea); and cedars such as Western red cedar (Thuja plicata) and Alaska yellow-cedar (Chamaecyparis nootkatensis) and Poplar and Eucalyptus. In specific embodiments, plants of the present invention are crop plants (for example, corn, alfalfa, sunflower, Brassica, soybean, cotton, safflower, peanut, sorghum, wheat, millet, tobacco, etc.). In other embodiments, corn and soybean plants are optimal, and in yet other embodiments soybean plants are optimal.

[0153] Other plants of interest include grain plants that provide seeds of interest, oil-seed plants, and leguminous plants. Seeds of interest include grain seeds, such as corn, wheat, barley, rice, sorghum, rye, etc. Oil-seed plants include cotton, soybean, safflower, sunflower, Brassica, maize, alfalfa, palm, coconut, etc. Leguminous plants include beans and peas. Beans include guar, locust bean, fenugreek, soybean, garden beans, cowpea, mungbean, lima bean, fava bean, lentils, chickpea, etc.

[0154] In some embodiments, the polynucleotides comprising the expression cassettes or suppression cassettes described elsewhere herein are engineered into a molecular stack. Thus, the various plants, plant cells and seeds disclosed herein can further comprise one or more traits of interest, and in more specific embodiments, the plant, plant part or plant cell is stacked with any combination of polynucleotide sequences of interest, expression cassettes of interest, or suppression cassettes of interest in order to create plants with a desired combination of traits. As used herein, the term “stacked” includes having the multiple traits present in the same plant.

[0155] These stacked combinations can be created by any method including, but not limited to, breeding plants by any conventional methodology, or genetic transformation. If the sequences are stacked by genetically transforming the plants, the polynucleotide sequences of interest can be combined at any time and in any order. The traits can be introduced simultaneously in a co-transformation protocol with the polynucleotides of interest provided by any combination of transformation cassettes. For example, if two sequences will be introduced, the two sequences can be contained in separate transformation cassettes (trans) or contained on the same transformation cassette (cis). Expression of the sequences can be driven by the same promoter or by different promoters. In certain cases, it may be desirable to introduce a transformation cassette that will suppress the expression of the polynucleotide of interest. This may be combined with any combination of other suppression cassettes or overexpression cassettes to generate the desired combination of traits in the plant. It is further recognized that polynucleotide sequences can be stacked at a desired genomic location using a site-specific recombination system. See, for example, WO 1999/25821, WO 1999/25854, WO 1999/25840, WO 1999/25855 and WO 1999/25853, all of which are herein incorporated by reference.

[0156] Thus, in specific embodiments, the expression cassettes and suppression cassettes disclosed herein function to produce self-reproducing hybrid progeny plants when combined in a progeny plant. Such expression and suppression cassettes can then be stacked with any other sequence of interest, including polynucleotides conferring herbicide tolerance. Non-limiting examples of such sequences are disclosed elsewhere herein.

[0157] A “subject plant or plant cell” is one in which genetic alteration, such as transformation, has been affected as to a polynucleotide of interest, or is a plant or plant cell which is descended from a plant or cell so altered and which comprises the alteration. A “control” or “control plant” or “control plant cell” provides a reference point for measuring changes in phenotype of the subject plant or plant cell. A control plant or plant cell may comprise, for example: (a) a wild-type plant or cell, i.e., of the same genotype as the starting material for the genetic alteration which resulted in the subject plant or cell; (b) a plant or plant cell of the same genotype as the starting material but which has been transformed with a null construct (i.e. with a construct which has no known effect on the trait of interest, such as a construct comprising a marker gene); (c) a plant or plant cell which is a non-transformed segregant among progeny of a subject plant or plant cell; (d) a plant or plant cell genetically identical to the subject plant or plant cell but which is not exposed to conditions or stimuli that would induce expression of the gene of interest; or (e) the subject plant or plant cell itself, under conditions in which the gene of interest is not expressed.

[0158] The methods of the invention comprise introducing expression and suppression cassettes disclosed herein into the genome of a plant or plant cell. The methods provided herein do not depend on a particular method for introducing polynucleotides comprising the expression or suppression cassettes into the host cell, only that the polynucleotide gains access to the interior of at least one cell of the host. Methods for introducing polynucleotides into host cells (i.e., plants) are known in the art and include, but are not limited to, stable transformation methods, transient transformation methods, and virus-mediated methods.

[0159] “Stable transformation” is intended to mean that the nucleotide construct introduced into a host (i.e., a plant) integrates into the genome of the plant and is capable of being inherited by the progeny thereof. “Transient transformation” is intended to mean that a polynucleotide is introduced into the host (i.e., a plant) and expressed temporally.

[0160] Transformation protocols as well as protocols for introducing polynucleotide sequences into plants may vary depending on the type of plant or plant cell, i.e., monocot or dicot, targeted for transformation. Suitable methods of introducing polynucleotides into plant cells include microinjection (Crossway, et al., (1986) Biotechniques 4:320-334), electroporation (Riggs, et al., (1986) Proc. Natl. Acad. Sci. USA 83:5602-5606, Agrobacterium-mediated transformation (Townsend, et al., U.S. Pat. No. 5,563,055; Zhao, et al., U.S. Pat. No. 5,981,840), direct gene transfer (Paszkowski, et al., (1984) EMBO J. 3:2717-2722) and ballistic particle acceleration (see, for example, Sanford, et al., U.S. Pat. No. 4,945,050; Tomes et al., U.S. Pat. No. 5,879,918; Tomes, et al., U.S. Pat. No. 5,886,244; Bidney, et al., U.S. Pat. No. 5,932,782; Tomes, et al., (1995) “Direct DNA Transfer into Intact Plant Cells via Microprojectile Bombardment,” in Plant Cell, Tissue, and Organ Culture: Fundamental Methods, ed. Gamborg and Phillips (Springer-Verlag, Berlin); McCabe, et al., (1988) Biotechnology 6:923-926) and Lec1 transformation (WO 2000/28058). Also see, Weissinger, et al., (1988) Ann. Rev. Genet. 22:421-477; Sanford, et al., (1987) Particulate Science and Technology 5:27-37 (onion); Christou, et al., (1988) Plant Physiol. 87:671-674 (soybean); McCabe, et al., (1988) Bio/Technology 6:923-926 (soybean); Finer and McMullen, (1991) In Vitro Cell Dev. Biol. 27P:175-182 (soybean); Singh, et al., (1998) Theor. Appl. Genet. 96:319-324 (soybean); Datta, et al., (1990) Biotechnology 8:736-740 (rice); Klein, et al., (1988) Proc. Natl. Acad. Sci. USA 85:4305-4309 (maize); Klein, et al., (1988) Biotechnology 6:559-563 (maize); Tomes, U.S. Pat. No. 5,240,855; Buising, et al., U.S. Pat. Nos. 5,322,783 and 5,324,646; Tomes, et al., (1995) “Direct DNA Transfer into Intact Plant Cells via Microprojectile Bombardment,” in Plant Cell, Tissue, and Organ Culture: Fundamental Methods, ed. Gamborg (Springer-Verlag, Berlin) (maize); Klein, et al., (1988) Plant Physiol. 91:440-444 (maize); Fromm, et al., (1990) Biotechnology 8:833-839 (maize); Hooykaas-Van Slogteren, et al., (1984) Nature (London) 311:763-764; Bowen, et al., U.S. Pat. No. 5,736,369 (cereals); Bytebier, et al., (1987) Proc. Natl. Acad. Sci. USA 84:5345-5349 (Liliaceae); De Wet, et al., (1985) in The Experimental Manipulation of Ovule Tissues, ed. Chapman, et al., (Longman, New York), pp. 197-209 (pollen); Kaeppler, et al., (1990) Plant Cell Reports 9:415-418 and Kaeppler, et al., (1992) Theor. Appl. Genet. 84:560-566 (whisker-mediated transformation); D'Halluin, et al., (1992) Plant Cell 4:1495-1505 (electroporation); Li, et al., (1993) Plant Cell Reports 12:250-255 and Christou and Ford, (1995) Annals of Botany 75:407-413 (rice); Osjoda, et al., (1996) Nature Biotechnology 14:745-750 (maize via Agrobacterium tumefaciens); all of which are herein incorporated by reference.

[0161] In specific embodiments, the expression and suppression cassettes disclosed herein can be provided to a plant using a variety of transient transformation methods. Such transient transformation methods include, but are not limited to, the introduction of the expression and suppression cassettes directly into the plant. Such methods include, for example, microinjection or particle bombardment. See, for example, Crossway, et al., (1986) Mol Gen. Genet. 202:179-185; Nomura, et al., (1986) Plant Sci. 44:53-58; Hepler, et al., (1994) Proc. Natl. Acad. Sci. 91:2176-2180 and Hush, et al., (1994) The Journal of Cell Science 107:775-784, all of which are herein incorporated by reference. Alternatively, expression and suppression cassettes can be transiently transformed into the plant using techniques known in the art. Such techniques include viral vector system and the precipitation of the polynucleotide in a manner that precludes subsequent release of the DNA. Thus, the transcription from the particle-bound DNA can occur, but the frequency with which it is released to become integrated into the genome is greatly reduced. Such methods include the use particles coated with polyethylimine (PEI; Sigma #P3143).

[0162] In other embodiments, expression and suppression cassettes disclosed herein may be introduced into plants by contacting plants with a virus or viral nucleic acids. Generally, such methods involve incorporating a nucleotide construct of the invention within a viral DNA or RNA molecule. Methods for introducing polynucleotides into plants and expressing a protein encoded therein, involving viral DNA or RNA molecules, are known in the art. See, for example, U.S. Pat. Nos. 5,889,191, 5,889,190, 5,866,785, 5,589,367, 5,316,931 and Porta, et al., (1996) Molecular Biotechnology 5:209-221; herein incorporated by reference.

[0163] Methods are known in the art for the targeted insertion of a polynucleotide at a specific location in the plant genome. In one embodiment, the insertion of the polynucleotide at a desired genomic location is achieved using a site-specific recombination system. See, for example, WO 1999/25821, WO 1999/25854, WO 1999/25840, WO 1999/25855 and WO 1999/25853, all of which are herein incorporated by reference. Briefly, the polynucleotide of the invention can be contained in transfer cassette flanked by two non-identical recombination sites. The transfer cassette is introduced into a plant having stably incorporated into its genome a target site which is flanked by two non-identical recombination sites that correspond to the sites of the transfer cassette. An appropriate recombinase is provided and the transfer cassette is integrated at the target site. The polynucleotide of interest is thereby integrated at a specific chromosomal position in the plant genome.

[0164] The cells that have been transformed may be grown into plants in accordance with conventional ways. See, for example, McCormick, et al., (1986) Plant Cell Reports 5:81-84. These plants may then be grown, and either pollinated with the same transformed strain or different strains, and the resulting progeny having constitutive expression of the desired phenotypic characteristic identified. Two or more generations may be grown to ensure that expression of the desired phenotypic characteristic is stably maintained and inherited and then seeds harvested to ensure expression of the desired phenotypic characteristic has been achieved. In this manner, the present invention provides transformed seed (also referred to as “transgenic seed”) having expression and suppression cassettes disclosed herein, stably incorporated into their genome.

### IV. SRH Cassette Insertion Location

[0165] Methods are known to insert polynucleotides at specific locations in the plant genome, including but not limited to SSI, Cas9, TALENs, meganucleases or other DSB technologies. These methods may be used to insert a self-reproducing hybrids cassette, for example, those in FIGS. 1, 2, 5, 6, & 7, into or next to a MiMe, Genome Elimination, or parthenogenesis locus. As used herein a MiMe, Genome Elimination, or parthenogenesis locus refers to a dominant or recessive allele of a gene responsible for one of these traits or a portion thereof. The inserted cassette may partially or completely complement the allele in some or all contexts.

[0166] For example, in one method, a CENH3 knockout may be created or targeted for nearby insertion using one of these technologies. Such a CENH3 knockout could be recessive. The allele may be maintained as a heterozygote or as a homozygote if complemented by a transgene cassette. In some instances the transgene cassette would be a complete or partial SRH cassette. In some instances the SRH cassette would be inserted at or near the CENH3 locus. If the SRH cassette is located at or near the CENH3 locus, then the combined locus/cassette would segregate and function as a single locus. In the situation of a recessive allele, both parents in the hybrid cross would need to contain recessive alleles at the native locus. This would alleviate a multi-locus trait that would otherwise hinder self-reproducing hybrid production using recessive or native trait loci. In some examples, both parents may contain complementary cross-activating SRH cassettes at or near the recessive native locus. In this way, trait introgression would be simplified and limit transgenic drag in many genetic backgrounds.

### EXAMPLES

### Example 1

### Plant Material and Growth Conditions

[0167] Plants were grown in artificial soil mix at 20° C. under fluorescent lighting. Wild-type and mutant strains of Arabidopsis were obtained from ABRC, Ohio or NASC, UK. dyad was crossed to the No-0 strain to generate populations that were heterozygous for markers across the genome. MiMe plants were a mixture of Col-0 from Atspo11-1-3/Atrec8-3 and No-0 from osd1-1 (S1). The GEM plants used in this study are F1 progeny obtained by crossing cenh3-1/cenh3-1 GFP-tailswap/GFP-tailswap (female) to cenh3-1/cenh3-1 GFPCENH3/GFP-CENH3 (male).

[0168] cenh3-1 was isolated by the TILLING procedure (Comai & Henikoff, (2006) Plant J 45:684-94). The TILLING population was created by mutagenizing Arabidopsis thaliana in the Col-0 accession with ethylmethanesulfonate, using standard protocols. Cenh3-1 was isolated by TILLING using the CEL1 heteroduplex cleavage assay, with PCR primers specific for the CENH3/HTR12 gene.

[0169] To cross wild-type as the female to GFP-tailswap as the male, a dissecting microscope was used to directly observe pollen deposition on the stigma (GFP-tailswap is mostly male-sterile). The amount of viable pollen in individual flowers of GFP-tailswap varies. Flowers that clearly showed higher amounts of pollen were selected and pollinated with more than 60 anthers (10 GFP-tailswap flowers) per wild-type stigma to achieve the seed set reported in Table 1. Using an optivisor (magnifying lens) and approximately 12 anthers (2 GFP-tailswap flowers) per wild-type stigma, a much lower seed set per silique was obtained. Seed from GFP-tailswap×wild-type crosses were sown on 1×MS plates containing 1% sucrose to maximize germination efficiency, particularly of seed that had an abnormal appearance. Late germinating seeds were frequently haploid.

[0170] A chimera was created in which the A. thaliana CENH3 tail from CENH3 is replaced with the CENH3 tail domain from maize (Zea mays), thereby generating a fusion of the maize CENH3 tail and A. thaliana CENH3 histone-fold domain, and transformed the fusion into cenh3-1 heterozygotes. As expected, this GFP-maize tailswap protein was targeted to kinetochores and rescued the embryo-lethal phenotype of cenh3-1.

### Example 2

### Genotypina and Microsatellite Marker Analysis

[0171] Primers for osd1-1, Atspo11-1-3 and Atrec8-3 (MiMe) genotyping are described (S1).

[0172] Microsatellite markers were analyzed. Primer sequences were obtained from TAIR (www.Arabidopsis.org) or from the MSAT database (INRA). cenh3-1: a point mutation G161A in the CENH3 gene (also known as HTR12) detected with dCAPS primers (dCAPs restriction polymorphism with EcoRV, the wild-type allele cuts):

Primer 1:
(SEQ ID NO: 6)
GGTGCGATTTCTCCAGCAGTAAAAATC
Primer 2:
(SEQ ID NO: 7)
CTGAGAAGATGAAGCACCGGCGATAT

Detection of GFP-tailswap insertion on chromosome 1:

Primer 1 for wild-type and T-DNA:
(SEQ ID NO: 8)
CACATACTCGCTACTGGTCAGAGAATC
Primer 2 for wild-type only:
(SEQ ID NO: 9)
CTGAAGCTGAACCTTCGTCTCG
Primer 3 for the T-DNA:
(SEQ ID NO: 10)
AATCCAGATCCCCCGAATTA

Primers for detection of GFP-CENH3:

(SEQ ID NO: 11)
CAGCAGAACACCCCCATC (in GFP)
(SEQ ID NO: 12)
CTGAGAAGATGAAGCACCGGCGATAT (in CENH3)

### Ploidy Analysis

[0173] MiMe and osd1 offspring ploidy analyses were performed by flow cytometry and systemically confirmed by chromosome spreads. For dyad offspring, ploidy analysis was by flow cytometry and randomly selected diploid eliminants (n=5) were further confirmed by FISH analysis using a centromere repeat probe to count chromosomes and all were found to be diploids. Isolation of nuclei for flow cytometry was performed. Flow cytometry analysis was carried out using an internal diploid and tetraploid control to unambiguously identify diploid plants.

[0174] In elimination crosses to the wild-type tetraploid line (C24 background), triploids were identified as late flowering (due to combination of the Col-0 FRIGIDA and C24 FLOWERING LOCUS C alleles). The aneuploid plants show distinct morphological phenotypes such as altered vegetative growth, variation in rosette leaf morphology (size and shape), a range of leaf color (pale yellow to dark green) and thus can be easily distinguished from normal diploid wild-type plants. Further, aneuploid plants show varied flowering time and mostly have reduced fertility and seed set. Putative diploids were genotyped for at least one marker per chromosome (Chr 1: F511, CIW12; Chr 2: MSAT2.11; Chr 3: MSAT3.19, CIW11; Chr 4: nga8; Chr 5: CTR1.2, nga106). Eliminants were identified as having only C24 alleles, in addition to lacking GFP fluorescence at the centromeres which is present in the GEM line. Random diploid plants (n=8) were further confirmed by karyotyping in meiotic chromosome spreads and all were found to be diploids.

[0175] The article “a” and “an” are used herein to refer to one or more than one (i.e., to at least one) of the grammatical object of the article. By way of example, “an element” means one or more element.

[0176] All publications and patent applications mentioned in the specification are indicative of the level of those skilled in the art to which this invention pertains. All publications and patent applications are herein incorporated by reference to the same extent as if each individual publication or patent application was specifically and individually indicated to be incorporated by reference.

[0177] Although the foregoing invention has been described in some detail by way of illustration and example for purposes of clarity of understanding, it will be obvious that certain changes and modifications may be practiced within the scope of the appended claims.

1. A method for producing a self-reproducing hybrid plant comprising:
a) obtaining a first plant comprising in its genome a first suppression cassette and a first expression cassette,
i) wherein said first suppression cassette comprises at least one first silencing element wherein said first silencing element, when expressed by said self-reproducing hybrid plant, reduces the level of at least one target sequence, wherein said target sequence comprises a member selected from the group consisting of,
A) a gene critical to meiotic second division reduction,
B) a gene critical to meiotic recombination, and
C) a gene critical to meiotic chromosome segregation,
ii) wherein the first plant comprises in the first suppression cassette or in a second suppression cassette an additional silencing element that inhibits wild-type centromere-specific polypeptide activity; and
iii) wherein said first expression cassette comprises a nucleic acid molecule encoding an active centromere-specific mutant polypeptide that is only active in said self-reproducing hybrid plant;
b) obtaining a second plant comprising in its genome a repressor cassette and a second expression cassette,
i) wherein said repressor cassette comprises a modified native repressible promoter linked to a wild-type centromere-specific gene, repressed in said self-reproducing hybrid plant, reducing the level of a wild-type centromere-specific polypeptide or a homolog thereof;
ii) wherein said second expression cassette comprises a transactivator and a nucleic acid molecule encoding a wild-type centromere-specific polypeptide or homolog thereof, wherein said centromere-specific polypeptide is expressed in said self-reproducing hybrid plant; and
c) crossing said first plant with said second plant thereby producing said self-reproducing hybrid plant.

2. The method of claim 1, wherein the active centromere-specific mutant polypeptide is CENH3, CENPC, MCM21, MIS12, NDC80 and NUF2.

3. The method of claim 1, comprising at least one first silencing element, wherein said at least one first silencing element has inhibitory activity against a target sequence, wherein said target sequence comprises a member selected from the group consisting of:
a) Osd1 or a homolog thereof;
b) Spo11-1 or a homolog thereof; and
c) Rec8 or a homolog thereof.

4. The method of claim 1, wherein an inducible promoter is operably linked to the at least one silencing element.

5. The method of claim 1, wherein the additional silencing element targets the promoter driving the wild-type centromere-specific polypeptide, or a homolog thereof.

6. The method of claim 1, wherein the additional silencing element targets (a) the nucleic acid encoding the wild-type centromere-specific polypeptide or homolog thereof or (b) wild-type centromere-specific polypeptide or homolog thereof.

7. The method of claim 1, wherein the additional silencing element is a repressor system.

8. (canceled)

9. The method of claim 1, wherein the wild-type centromere-specific polypeptide is CENH3 or a homolog thereof.

10. The method of claim 1, wherein the nucleic acid molecule encoding an active centromere-specific mutant polypeptide is CENH3-tailswap.

11. The method of claim 1, wherein a promoter is operably linked to the additional silencing element, and the promoter is specifically induced by a transactivator.

12. (canceled)

13. (canceled)

14. A first plant comprising an active CENH3 mutant expression cassette comprising a central cell-specific promoter, a CENH3 suppression cassette comprising a transactivator A-inducible promoter, a CENH3 expression cassette comprising an egg-cell specific promoter, and a transactivator B expression cassette comprising an active promoter.

15. A second plant comprising an active CENH3 mutant expression cassette comprising a pollen or sperm-cell expressing promoter, a MiMe suppression cassette comprising a transactivator B-inducible promoter, and a transactivator A expression cassette comprising a germline preferred promoter.

16. A pair of plants to produce a tetraploid zygote wherein the first plant comprises an active CENH3 mutant expression cassette comprising a central cell-specific promoter, a CENH3 suppression cassette comprising a transactivator A-inducible promoter, a CENH3 expression cassette comprising an egg-cell specific promoter, and a transactivator B expression cassette comprising an active promoter and wherein the second plant comprises an active CENH3 mutant expression cassette comprising a sperm-cell preferred promoter, a MiMe suppression cassette comprising a transactivator B-inducible promoter, and a transactivator A expression cassette comprising a germline preferred promoter.

17. A method for producing a tetraploid zygote comprising:
(a) crossing a first plant comprising an active CENH3 mutant expression cassette comprising a central cell-specific promoter, a CENH3 suppression cassette comprising a transactivator A-inducible promoter, a CENH3 expression cassette comprising an active promoter, and a transactivator B expression cassette comprising an ovule-specific promoter with a second plant comprising an active CENH3 mutant expression cassette comprising a sperm-cell preferred promoter, a MiMe suppression cassette comprising a transactivator B-inducible promoter, and a transactivator A expression cassette comprising a germline preferred promoter to produce a tetraploid zygote

[symbol]

18. The method of claim 17, where in the tetraploid zygote subsequently loses the male genome from the sperm cell following a generation of self-fertilization, ultimately resulting in a self-reproducing hybrid progeny plant.

19. (canceled)

20. (canceled)

21. (canceled)

22. (canceled)

23. A method for providing self reproducing hybrids comprising:
a. Providing a first inbred plant line which comprises:
i. transactivator elements A and B
b. Crossing the first inbred plant line with a second inbred line which comprises
i. Promoter A linked to MiMe silencing element; and
ii. Promoter B linked to CENH3 silencing element.

24. The method of claim 23 for providing self reproducing hybrids comprising:
a. Providing a first inbred plant line which comprises:
i. A female germline promoter linked to a repressor,
ii. a transactivator A promoter linked to MiMe, and
iii. an egg cell promoter linked to CENH3 tailswap
b. Crossing the first inbred plant line with a second inbred line which comprises:
i. a CENH3 tetOP promoter linked to native CENH3,
ii. a constitutive promoter linked to transactivator A, and
iii. a central cell promoter linked to CENH3
c. Producing an F1 hybrid from the two parent lines, where the 2 component transcriptional activator and repressor are brought into a common hybrid genome and activate the silencing elements and or repress the genes required for MiMe and genome elimination.

25. The method of claim 23 for providing self reproducing hybrids comprising:
a. Providing a first inbred plant line which comprises:
i. a meiosis promoter linked to a (tetR) repressor,
ii. a transactivator A promoter linked to MiMe, and
iii. an egg cell promoter linked to CENH3.
b. Crossing the first inbred plant line with a second inbred line which comprises:
i. a CENH3 tetOP promoter linked to native CENH3,
ii. a constitutive promoter linked to transactivator A,
iii. a central cell promoter linked to CENH3 tailswap, and
iv. a pollen promoter linked to CENH3 tailswap.
c. Producing an F1 hybrid from the two parent lines, where the 2 component transcriptional activator and repressor are brought into a common hybrid genome and activate the silencing elements and or repress the genes required for MiMe and genome elimination.

26-36. (canceled)

The application's sequence listing, which the Patent Office published only in electronic form, follows.

SEQUENCE LISTING (288 sequences)

SEQ ID NO: 1 - protein, 16 aa, artificial sequence
  primer
PRGLYTHRVALALALE

SEQ ID NO: 2 - DNA, 1089 bp, Arabidopsis thaliana
atggagggaaaattcgctatttcagaatcgactaatttgcttcaaaggatcaaagattttactcaatcggtcgttgtagatctggctgaaggaagatctccaaaaatttccatcaatcaattcaggaactattgcatgaatccagaagctgattgcttatgcagctctgataaaccaaagggtcaggaaattttcactcttaagaaggaaccacaaacctacagaatcgatatgttgctaagagtattgttgatagtccaacaacttctgcaagaaaatagacatgcttcgaaaagagatatctactacatgcatccatcagctttcaaagcacaatccattgtggaccgtgcaattggtgatatatgcattctttttcagtgtagtcggtacaacttgaatgtggtttctgttggaaacgggttggtgatgggttggttaaaatttagggaagctggaaggaaatttgattgtttaaacagcttgaacactgcatatcccgttcctgttcttgtagaggaagtcgaagatattgttagcttagctgagtacatactggttgtggaaaaagaaacagtattccagcgtttagcaaatgacatgttttgcaagacgaaccgctgcattgttatcacaggaagaggatatccagatgtctcaacaagaaggttcttgcgactcctgatggagaagttgcatctacctgtgcattgtctagtcgactgtgatccatatggctttgagatcctagccacataccgttttggctccatgcaaatggcctatgatattgaatcattacgagcaccagatatgaaatggttgggagcttttccttcagactctgaggtatatagtgttcccaaacagtgtcttttgccactgacagaagaagataagaaaagaactgaagcaatgttgcttagatgctacctgaagcgtgaaatgccacaatggaggttggaacttgaaacgatgttgaaaagaggggtcaagtttgagatcgaagcactctcagttcactcactgtcctttttgtcagaggtatatattccttctaagattcgtcgtgaagtaagctctccttga

SEQ ID NO: 3 - DNA, 1279 bp, Arabidopsis thaliana
cactctccccaagaaagctctcttctctctctcactctctctctctcattgtctctctacacagttttggagtttatcaatagctttattgaagattcaaagcgacgttatcaaaatgccagaagcaagagatcgaaccgagaggcctgtggattactcgactatatttgccaaccgacggagacatggtattttacttgacgagccagattcacggcttagtttgattgaatctccggtgaatccagatattgggtctattggtggaacgggcgggcttgtgagaggcaatttcactacatggaggcctggtaatggcagaggtggtcacactccatttagattgccacagggaagagagaatatgcccatagtgaccgctaggcgtggaagaggtggtggtttgttgccttcttggtatccaagaacacctctacgcgacataactcatattgtgcgggctattgagagaagaagaggagctgggactggaggagacgatggccgagttattgagatcccaactcatcgacaagttggtgttcttgaatctccagtaccactgtcaggagaacacaaatgctcgatggtcactcctggaccatctgtgggattcaagcgtagttgcccaccatcaactgctaaagttcaaaagatgttacttgacatcactaaagagatagctgaggaagaagctggcttcatcacacccgagaagaagctactcaattctattgacaaagttgagaaaattgtgatggcggagatccagaagttgaagagcactcctcaagctaaaagggaagagcgggagaagagggtgcggactttaatgactatgcgatgatctttacttaggagaagagaccagatgcgatgatccttacttaggagaagagaccatagaggtatatctgcttaaaggttcctgcacagtgagtacatcatcttcttatgatatcatagatggatctacaggtcatcctctaatgacatatcttcacaagttcggtggtttcttagacttgtatcattttctgatgattttattagaagcgtcaatcatcttttgacgattttataggatactcgttttggaaaatcattgttctgatgatagaatagatcaggaatcatctgctgatgatgatatcataggaaagattataatagttcacacatttcatatctgaagtgtcatcacttgtagacgattttggcttgttgttgactttcaataattgagttgtatataagtattgaatgtttggttttattg

SEQ ID NO: 4 - DNA, 2093 bp, Arabidopsis thaliana
aacttcaatggagactggagagagagaagggacgtaattaaacaccaaagcgtttttatatttcggagaatcaactacgtgtcgtttgacatcctaaattggcagatagtagaaaggaaatgttgagactggagagtttgatagtaacagtgtggggaccagcgacgcttctagctcgaaaagctccgttgggtcagatatggatggccgctacattgcacgcgaagatcaaccggaagaaactagataagctcgatatcattcaaatctgcgaagagattttgaatccgtcggttccgatggctcttagactctccgggattcttatgggtggtgttgtgattgtttatgagaggaaagtgaagctcctattcgatgatgttaatcgctttctggttgaaattaatggagcttggcgcacaaaatctgttccggatcccactttactacctaaaggaaaaacccatgccaggaaagaggctgttacattgcctgagaacgaagaagctgattttggagattttgaacagactcgtaatgttcctaaatttggcaattacatggattttcagcagacttttatttccatgcggttagatgaatcccatgttaacaataaccccgagccagaagatcttggacagcagttccatcaagctgatgccgagaatatcacactctttgagtatcatggttcattccagaccaacaatgaaacatatgatcgttttgaaagatttgacatcgaaggagatgatgaaacacagatgaactccaatccaagagaaggcgctgaaatacctacaactctcatcccatcaccacctcgtcatcatgacattcccgaaggagtcaaccccacaagccctcagcgccaggagcaacaggagaatcgtagggacggatttgctgagcagatggaggaacaaaacataccggacaaagaggaacacgatagaccacaaccagcgaaaaagagagcaagaaagacagctacttcagcgatggattatgagcaaactattatcgctggtcatgtttaccagtcatggctccaggatacttctgacattctctgtaggggggaaaagagaaaggttcgaggaactatccggccagacatggaaagtttcaaacgtgcgaatatgccacctacacaactctttgaaaaggacagttcttacccgcctcagctttaccagctttggtcaaagaatactcaagttcttcaaacctcatcatctgaatctcgacatcctgatctccgtgcggaacaatctccagggtttgttcaggagagaatgcataaccaccatcaaacagaccatcatgagcgcagtgacacaagctcccaaaatcttgatagtcccgcagaaatactccggacagttcgtactgggaaaggtgcttcagtagaaagcatgatggctggatctcgagcaagccctgaaactattaaccgccaggctgctgatattaatgtcacgccattctattctggagatgatgtgagatccatgcctagtacaccatccgcacgtggagcagcttcaattaacaacatagagatcagctctaaaagtcgcatgcccaatagaaaaagaccaaattcctcaccaagaagaggactcgaaccagtggcggaagagagaccgtgggagcaccgtgaatatgagtttgagttttcaatgttacctgaaaaacgcttcacagccgataaagaaatactatttgaaactgcatctacacagactcaaaagccagtgtgcaatcaatcagacgagatgataacagatagcatcaaaagtcacctgaagacacactttgaaacacctggagctcctcaagtggaatctcttaacaagctcgctgttggaatggacagaaacgctgcagctaaactcttcttccaatcctgtgtgttagctactcgcggagtcatcaaggtaaaccaagcagagccttatggggacattctcattgcaagaggacccaacatgtaaggtttgatttctaaattataaaagattctggtgaaccgattatccatagttgttttgcttttcatattctagcagagagagttcgtagac

SEQ ID NO: 5 - DNA, 909 bp, Arabidopsis thaliana
aaattgtgaagcagattcgattttaaaatcaaaatttgagtgtcgagcgggaaagtaaaagttccgctccaatcttctaatcttttcgtatctagcgggaaatttctcagcagtaaaaatcaatggcgagaaccaagcatcgcgttaccaggtcacaacctcggaatcaaactgatgccgccggtgcttcatcttctcaggcggcaggtccaactacgaccccgacaaggagaggcggtgaaggtggagataatactcaacaaacaaatcctacaacttcaccagctactggtacaaggagaggggctaagagatccagacaggctatgccacgaggctcacagaagaagtcttatcgatacaggccaggaaccgttgctctaaaagagattcgccatttccagaagcagacaaaccttcttattccggctgccagtttcataagagaagtgagaagtataacccatatgttggcccctccccaaatcaatcgttggacagctgaagctcttgttgctcttcaagaggcggcagaagattacttggttggtttgttctcagattcaatgctctgtgctatccatgcaagacgtgttactctaatgagaaaagactttgaacttgcacgccggcttggaggaaaaggcagaccatggtgatagaaaactcactcactattcacatctcttacattgtaagtgaggatcgaatagttaacaacaagtgtgtcgtaggttgtataaggttattctctccttgtctcttggtgatgcatgtccttttattttactaaatgatctgaccaaaaccttcttttgaaacataactggaaacccgaatttggtttgattccaatatctaggctgtaaaacttctttctctatgtgtgtttctatctgcttttcgttg

SEQ ID NO: 6 - DNA, 27 bp, Artificial sequence
  primer
ggtgcgatttctccagcagtaaaaatc

SEQ ID NO: 7 - DNA, 26 bp, Artificial sequence
  primer
ctgagaagatgaagcaccggcgatat

SEQ ID NO: 8 - DNA, 27 bp, Artificial sequence
  primer
cacatactcgctactggtcagagaatc

SEQ ID NO: 9 - DNA, 22 bp, Artificial sequence
  primer
ctgaagctgaaccttcgtctcg

SEQ ID NO: 10 - DNA, 20 bp, Artificial sequence
  primer
aatccagatcccccgaatta

SEQ ID NO: 11 - DNA, 18 bp, Artificial sequence
  primer
cagcagaacacccccatc

SEQ ID NO: 12 - DNA, 26 bp, Artificial sequence
  primer
ctgagaagatgaagcaccggcgatat

SEQ ID NO: 13 - DNA, 992 bp, Brassica napus
gggcgtgttaagaagtaggaggaccattcatgcctcttatgagttgtagtctgtgtgtacaaaaaagaagcgttggtgtgaaagaaagcagaaggatttgaaaatcaaaaaaattgaaggagaagcgggaaaacaaataatctctccctccgcttttttttctccaaataatcaatctctcatttcatttgttaacccaagtttttgataattatttcaaaggggtttatttatcttttattcctccggcggcagtaagtagtaatcaatggcgagaaccaaacatttcgcttccagggcacgagatcgcaatcgaactaatgcgactgcttcatcttcggcggcggcggcggaaggtccgagtgcgaccccgacgagaagagaaggcagccaaggagaagctcaacagacagcaactcctactacgactccaccagccggtagaaaaaaaggagggactaagcgaactaaacaagctatgcctaaaagttccaacaagaagaagacattccgttacaagcctggaaccgttgccctcagagagattcgccatttccagaagaccaccaaacttcttatccctgccgctagtttcatccgagaagtgagaagtgtcacccagatctttgcccctcccgatgttacccgttggactgctgaagctcttatggctattcaagaggcggctgaagattttttaattggcttgttctctgatgctatgctttgcgctatccatgcaaggcgtgttactctaatgagaaaagattttgagcttgcacgccgtcttggaggaaaaggcagaccattgtgatcgtttcgcaggttgtataactttgttcactccttatgtcttgtcatttgtgatctgactgacactttcttttgaaacataactgcttgattcaatatctaggctgtaaaacttatccctccttgtttactatcttatatgctttttccttggaattgatagtttccattgtgatttt

SEQ ID NO: 14 - DNA, 726 bp, Brassica rapa
atggcttccttccacatcccacctaaccttgtaggcatcgaaacaagatactgtggatatggagatcattgcaagttcttgcatgaccgtggagattacaaaccgggatggcagatagagaaagagtgggaagaagctgagaaagttaggaagagaaataaagctatgggagttgaagatgatgatgatgctaaaagtgaggaagacgaagatgcattgctatttgcttgtttcatattcagagagccttttgttgatccagttgtcaccaaattgcaagcattacttctggatttatctatcttttacggtgcgattcctccggcggcagtaagtgaaatcaaatcaatggcgagaacgaaacatttcgcttccagggcccgagatcgcaatccaactagttccaacaagaagaagacattccgttacaagcctggaaccgttgccctcagagagattcgccatttccagaagaccaccaaacttcttatccctgccgctagtttcatccgagaagtgagaagtgtcacccagatctttgcccctcccgatgttacccgttggactgctgaagctcttatggctattcaagaggcggctgaagatttcctagttggcctcttctctgatgcgatgctctgcgctatccacgcaagacgtgttactctaatgagaaaagattttgagcttgcacgccgtcttggaggaaaaggcaggccattgtga

SEQ ID NO: 15 - protein, 241 aa, Brassica rapa
MASFHIPPNLVGIETRYCGYGDHCKFLHDRGDYKPGWQIEKEWEEAEKVRKRNKAMGVEDDDDAKSEEDEDALLFACFIFREPFVDPVVTKLQALLLDLSIFYGAIPPAAVSEIKSMARTKHFASRARDRNPTSSNKKKTFRYKPGTVALREIRHFQKTTKLLIPAASFIREVRSVTQIFAPPDVTRWTAEALMAIQEAAEDFLVGLFSDAMLCAIHARRVTLMRKDFELARRLGGKGRPL

SEQ ID NO: 16 - DNA, 621 bp, Glycine max
atggaggcaaaccgcttcattttgaaaattcacaaaccaatagtgaaaagagacagagagggaaaaagaagaagaaaagaaaaagaaaattgcaaaaagcgaaaccgaaaaccaaatccgaagagtgaaggttcgttgaatcccatggcgagagtgaagcacacgccagcttctcgcaaatccgctaaaaagcaagcgccacgcgcatccacttccacgcagccgccaccacaatcccaatcgcctgcaactagagagaggaggagagctcaacaagtggagccgcagcaggagcctgaggctcagggaaggaagaagaggcgcaataggtcgggaactgtggcgcttcgtgagattcggcattttcagaggagttgtgagcttctcatcccggctgctccctttatcagatgtgtcaaacagattacaaatcaattctctacggaggtgtctcgttggacacctgaagctgtggtagcacttcaggaggcagctgaggaatatctggttcacttatttgaagatggaatgctctgtgcaattcatgcaaggcgtattactcttatgaaaaaggacattgagttggcccggaggcttggaggaataggaaggccttggtga

SEQ ID NO: 17 - protein, 206 aa, Glycine max
MEANRFILKIHKPIVKRDREGKRRRKEKENCKKRNRKPNPKSEGSLNPMARVKHTPASRKSAKKQAPRASTSTQPPPQSQSPATRERRRAQQVEPQQEPEAQGRKKRRNRSGTVALREIRHFQRSCELLIPAAPFIRCVKQITNQFSTEVSRWTPEAVVALQEAAEEYLVHLFEDGMLCAIHARRITLMKKDIELARRLGGIGRPW

SEQ ID NO: 18 - DNA, 618 bp, Medicago truncatula
atggcgcgtacaaagcaaactgctcgcaaatccaccggtggcaaggcaccaacgaaggtgctcgccacaaagattgctcgtaattataaaccaaagggaggacttaagagacctcgtcgttttcgtcctggaacagttgctcttcgcgagatacgtaaataccagaagagttccgatcttttgatccgtaagcttccattccagcgtcttgttcgtgaaattgctcatgttgatctcaagccggatttcagattccagagtcatgcggttctcgcacttcaggaagcagcggaagcatatttggttggtttgtttgaggataccaatttgtgtgcaattcatgctaagagggttaccattatgcctaaggatattcaacttgcttgccgtatccgtggtgaacgtcgtgattattggaaaaagatacaaaactgctcatattcttgcgttaatcgtagtttaggagtatttacgagtggcgccgttaattggttgacatatgatgtttcgagtagttctctttgcatgctattgcttcccttgatttggataaagagtcgtatcaaaacatttgccggccatatttggagattgatttcaagaccttatggatgttga

SEQ ID NO: 19 - protein, 205 aa, Medicago truncatula
MARTKQTARKSTGGKAPTKVLATKIARNYKPKGGLKRPRRFRPGTVALREIRKYQKSSDLLIRKLPFQRLVREIAHVDLKPDFRFQSHAVLALQEAAEAYLVGLFEDTNLCAIHAKRVTIMPKDIQLACRIRGERRDYWKKIQNCSYSCVNRSLGVFTSGAVNWLTYDVSSSSLCMLLLPLIWIKSRIKTFAGHIWRLISRPYGC

SEQ ID NO: 20 - DNA, 498 bp, Oryza sativa
atggctcgcacgaagcacccggcggtgaggaagtcgaaggcggagcccaagaagaagctccagttcgaacgctcccctcggccgtcgaaggcgcagcgcgctggtggcggcacgggtacctcggcgaccacgaggagcgcggctggaacatcggcttcagcagggacgcctaggcagcaaacgaagcagaggaagccacaccgcttccgtccaggcacagtggcactgcgggagatcaggaaatttcagaaaaccaccgaactgctgatcccgtttgcaccattttctcggctggtcagggagatcactgatttctattcaaaggatgtgtcacggtggacccttgaagctctccttgcattgcaagaggcagcagaataccacttagtggacatatttgaagtgtcaaatctctgcgccatccatgctaagcgtgttaccatcatgcaaaaggacatgcaacttgccaggcgtatcggtgggcggaggccatggtga

SEQ ID NO: 21 - protein, 165 aa, Oryza sativa
MARTKHPAVRKSKAEPKKKLQFERSPRPSKAQRAGGGTGTSATTRSAAGTSASAGTPRQQTKQRKPHRFRPGTVALREIRKFQKTTELLIPFAPFSRLVREITDFYSKDVSRWTLEALLALQEAAEYHLVDIFEVSNLCAIHAKRVTIMQKDMQLARRIGGRRPW

SEQ ID NO: 22 - DNA, 495 bp, Oryza sativa
atggctcgcacgaagcacccggcggtgaggaagtcgaaggcggagcccaagaagaagctccagttcgaacgctcccctcggccgtcgaaggcgcagcgcgctggtggcggcacgggtacctcggcgaccacgaggagcgcggctggaacatcggcttcagggacgcctaggcagcaaacgaagcagaggaagccacaccgcttccgtccaggcacagtggcactgcgggagatcaggaaatttcagaaaaccaccgaactgctgatcccgtttgcaccattttctcggctggtcagggagatcactgatttctattcaaaggatgtgtcacggtggacccttgaagctctccttgcattgcaagaggcagcagaataccacttagtggacatatttgaagtgtcaaatctctgcgccatccatgctaagcgtgttaccatcatgcaaaaggacatgcaacttgccaggcgtatcggtgggcggaggccatggtga

SEQ ID NO: 23 - protein, 164 aa, Oryza sativa
MARTKHPAVRKSKAEPKKKLQFERSPRPSKAQRAGGGTGTSATTRSAAGTSASGTPRQQTKQRKPHRFRPGTVALREIRKFQKTTELLIPFAPFSRLVREITDFYSKDVSRWTLEALLALQEAAEYHLVDIFEVSNLCAIHAKRVTIMQKDMQLARRIGGRRPW

SEQ ID NO: 24 - DNA, 438 bp, Setaria italic
atggctcgcaccaagcacgcggccgtgaagaaatcgaaggagcagcccaagaagaagctccagttcgcgcgctccccgcaccggagggcgacgccgacaggtacgccggggcggcagcagcagagggtgaagaagccccaccgctggaggccagggacagtagcactgcgagagatcaggaagtaccagaaatccactgagctgcttatcccctttgcgccattcgcccgtctggtgagggagatcactgacttctactcaaagggcaaggtaacgcgctggaccccgcaagcgctccttgcgatgcaagaggcagcagaattccacctgatcgaactgttcgaagtatcaaatctttgtgccatccacgccaaacgtgttactatcatgcaaagggacatacagcttgcaaggcgtatcgggggaaggttttggtga

SEQ ID NO: 25 - protein, 145 aa, Setaria italic
MARTKHAAVKKSKEQPKKKLQFARSPHRRATPTGTPGRQQQRVKKPHRWRPGTVALREIRKYQKSTELLIPFAPFARLVREITDFYSKGKVTRWTPQALLAMQEAAEFHLIELFEVSNLCAIHAKRVTIMQRDIQLARRIGGRFW

SEQ ID NO: 26 - DNA, 474 bp, Sorghum bicolor
atggctcgaaccaagcaccaggccgtgaggaagctgccgcagaagcccaagaagaagctccagttcgagcgcgcaggtggggcgagtacgtcggcgaccccggagaggaggaatgctgggaccgggggaggagccgcggctcgcgttgcacgggggcgtgtggagaagaagcatcgctggcgggcagggactgtagcgctgcgggagatcaggaagtaccagaagtccactgagccgctcatcccctttgcgcccttcgtacgtgtggtcaaagagttaactgcattcataacagactggaggatagggcgctacacccctgaagccctccttgcgctgcaagaggcagcagaattccacttgatagaactgtttgaagtggcgaatctgtgtgccatccatgccaagcgcgtaacagtcatgcaaaaggacatacaacttgcaaggcgtatcggaggaaggcgttggtcgtga

SEQ ID NO: 27 - protein, 157 aa, Sorghum bicolor
MARTKHQAVRKLPQKPKKKLQFERAGGASTSATPERRNAGTGGGAAARVARGRVEKKHRWRAGTVALREIRKYQKSTEPLIPFAPFVRVVKELTAFITDWRIGRYTPEALLALQEAAEFHLIELFEVANLCAIHAKRVTVMQKDIQLARRIGGRRWS

SEQ ID NO: 28 - DNA, 471 bp, Vitis vinifera
atgaatataaaaatagaatcgagggaaaaaaaatctaacagccattttatatatgtacctgcaacacctgcttcgccagcatcggctggaccgagttcggcaccacccagaaggccaacaaggactgcaacggatgcttcaccaaggagtcagggacaaaggaagccttttcgctataggccaggaactgtggctcttcgggagattcggcgatttcagaagaccacgcatctactaatcccagctgctcctttcattagaactgttagagagattagctacttttttgctccagaaatttctcgttggacagccgaagctttagtagcacttcaggaggcagcagaggattatctggttcatttgtttgaagatgcaatgctttgtgcaattcatgcaaaacgcgtaacactaatgaaaaaggactgggagttggcacgtcggattggagggaaaggacagccttggtga

SEQ ID NO: 29 - protein, 156 aa, Vitis vinifera
MNIKIESREKKSNSHFIYVPATPASPASAGPSSAPPRRPTRTATDASPRSQGQRKPFRYRPGTVALREIRRFQKTTHLLIPAAPFIRTVREISYFFAPEISRWTAEALVALQEAAEDYLVHLFEDAMLCAIHAKRVTLMKKDWELARRIGGKGQPW

SEQ ID NO: 30 - DNA, 1295 bp, Zea mays
aagcatctctcactgcattccgggcccactactcaaacgttcggcacgccaggttggcaggtagccgttacatcgataggcactcggccactcgcacgcagacaccacaccagtgtgctcagtgctcactgctcaccataataacgctgcacctcttttcatttcaccatctcctgcccccttaaaaaaaagactcaccgtcgacacgccctcccgtcccgagagttctgaatcgaaaccgtcggccacgagagcagtgcgaggcgcccaccgcgatggctcgaaccaagcaccaggccgtgaggaagacggcggagaagcccaagaagaagctccagttcgagcgctcaggtggtgcgagtacctcggcgacgccggaaagggctgctgggaccgggggaagagcggcgtctggaggtgactcagttaagaagacgaaaccacgccaccgctggcggccagggactgtagcgctgcgggagatcaggaagtaccagaagtccactgaaccgctcatcccctttgcgcctttcgtccgtgtggtgagggagttaaccaatttcgtaacaaacgggaaagtagagcgctataccgcagaagccctccttgcgctgcaagaggcagcagaattccacttgatagaactgtttgaaatggcgaatctgtgtgccatccatgccaagcgtgtcacaatcatgcaaaaggacatacaacttgcaaggcgtatcggaggaaggcgttgggcatgatatataatatccattctgattgcatcattcttgtgaatttgtttgtaggagctagacattagtgttgttgaatgctgcatggttcctaatccttttcgcagtctaacatctgtggagttagtatgttacatggcaacagctgaacatctgtggactatatggcaacagccgaagattgtgtctgtgggataactggttgttttggttgctcttcagtagtttgtttgcttcagtctgcagtatggactatggagtaaactgcatgctgaaacccgaaccactgctgaaactgcatgctgaaacccgaaccactgctacggcagttgccaggatagcaggagggcctttatgcacagtggaattgagtagagaactgagtaaaccatggttctttctccttttgaactggaacacacacagttggatcttgtttctcttcttaggccattcatcgtgtttattaggggtgtaaatggtacaaatattatctgtccgtattcgaatttgatctatctaagaaggttgaaatccgatccgtattcgagt

SEQ ID NO: 31 - protein, 157 aa, Zea mays
MARTKHQAVRKTAEKPKKKLQFERSGGASTSATPERAAGTGGRAASGGDSVKKTKPRHRWRPGTVALREIRKYQKSTEPLIPFAPFVRVVRELTNFVTNGKVERYTAEALLALQEAAEFHLIELFEMANLCAIHAKRVTIMQKDIQLARRIGGRRWA

SEQ ID NO: 32 - DNA, 660 bp, Brassica napus
gactcactctcttccccaagaacactcgccgcttcaagagtctcaccagtccgtcaatcgcctactgaagattcagagccaccggatcttgaaaatggcagaggcgagagatcgattggagaagccggtggattacgcggcgatatttgccaacagacgcagtcacggtgtgttgctcgacgagccagcgtcgcgtctcggtgtgttcgaacatccagttcgcagattaccgtcgggttctcgggtgtatccacaacctggaggcaattacagttcatggaggcctggtcatgggaatgggagtggtcagagtccgtttagattctcccagggaagagagaatgtgactatggcgtctgctaggcgtggaagaggtggtgcttcagggagtttgttaccttcttggtacccaaggacgcctctacgtgatataactcacattatgcgggctattgagagaaaaagaagagctggtatgggagtagagagtgccctggggggtgagactccatctcaccaacaagttcgttttcttgaaactccggtcgcattggcggaagatgagcacaattgcgtaatgatgacacctgctccagctgtgggattgaagcgtagttgcccaccatcaaccgctaaagtccataagatgttgcttgacat

SEQ ID NO: 33 - DNA, 744 bp, Brassica rapa
atggcggaggcgagagatcgattggagaagccggtggattacgcggcgatatttgccaacagacgcagtcacggtgtgttgctcgacgagccagcgtcaggtctcggtgtgttggaacatccagttcgcagattgccgtcgggttctcgggtgtatccacagcctggatctttgattggaggcaactacagttcgtggaggcctggtcatgggagtggtcagagtccgtttagatcctctcagggaagagagaatctgcctaggcgtggaagaggtggtgcttcagggagtttgttaccttcttggtacccaaggacgcctctacgtgatataactcacattatgcgggctattgagagaaaaagaagagctggtatgggagtagagagtgccctggggggtgagactccatctcaccaacaagttcgttttcttgaaactccggtcgcattggcggaagatgagcacaattgcgtaatggtgacacctgctccagctgtgggattgaagcgtagttgccctccatcaactgctaaagtccacaagatgttgcttgacatcacaaaggagatatctgagaaggatgaagaagcagggttcatcactcccgagaagaagctactcaattctatcgacgtggtggagaagattgtgatggcggagattcagaaactgaagagcactccgcttgcaaaacggcaagagcgggagaagagggtcaagactttgatgtcgatgcgatga

SEQ ID NO: 34 - protein, 247 aa, Brassica rapa
MAEARDRLEKPVDYAAIFANRRSHGVLLDEPASGLGVLEHPVRRLPSGSRVYPQPGSLIGGNYSSWRPGHGSGQSPFRSSQGRENLPRRGRGGASGSLLPSWYPRTPLRDITHIMRAIERKRRAGMGVESALGGETPSHQQVRFLETPVALAEDEHNCVMVTPAPAVGLKRSCPPSTAKVHKMLLDITKEISEKDEEAGFITPEKKLLNSIDVVEKIVMAEIQKLKSTPLAKRQEREKRVKTLMSMR

SEQ ID NO: 35 - DNA, 672 bp, Brassica rapa
atgccagaagcgagagaccgacgcgagaggtctgtggattaccccgccgcgtttctcaaccggcgatcccacgggatcttgctcgacgagtcaccacttcggtctcctgttcagagactgccttcttcagaatcgttagtgtttgggagaggtggatttgcgaggggcaatttgggaattcgacggacaggtggcggtggaggtagaaggcgtggcagggcacgtgcctcagcttctgtgttgccttcttggtatccaagaacgcctctccgtgacgtgtcttctgtcgttagggcgattgagaggaggagagctcgtgtgggagacgttgagaccccaactccacagcagcttgaggtggttcttgatgattctttagcaccagtgtctggcgagcggaactactccatggtgactcctggtccgtctgttgggttcaagcgtccctggccgccttcgactgctaaagtccatcagattctgctcgacatcacaaggcagagttcagcggaagaggaagaggaagcgctcactccgcagaagaagctcctcaactctattgataaagtggagaaggttgtgatggaagagattcagaagatgaagagcactcctagtgctaagagagctgaaagggagaaaagggtccggactttaatgtccatgcgatga

SEQ ID NO: 36 - protein, 223 aa, Brassica rapa
MPEARDRRERSVDYPAAFLNRRSHGILLDESPLRSPVQRLPSSESLVFGRGGFARGNLGIRRTGGGGGRRRGRARASASVLPSWYPRTPLRDVSSVVRAIERRRARVGDVETPTPQQLEVVLDDSLAPVSGERNYSMVTPGPSVGFKRPWPPSTAKVHQILLDITRQSSAEEEEEALTPQKKLLNSIDKVEKVVMEEIQKMKSTPSAKRAEREKRVRTLMSMR

SEQ ID NO: 37 - DNA, 648 bp, Glycine max
atgcccgaatcacgcgaccgtcgcataaccgtcgtcgacctcgccgccgccatcgcccgccgccgcgcctcattcatctacatcgattctccgccgctccgaacgcctcaaagaaccgccgccatcggccgtggaagagctagcggttctcccggctctcagaacacacctccatcaactgctcgacgtggtagaggacgcgttccgtcacgcaacgtgcttcccgcgtggtaccctaggacaccactccgtgacattactgttgtcgttcaggcgatcgagaggagaagagcgaggtcaggagaagccgaaggccagcgaatcggaagcaccgatcctgcttcggatcgattagttacagaaccttccgaacctgcttctgctgattctgcggtgaaatcgccgaaatccgttggtgtgaagctccgaacgccgttcggcagcaaagtgccgaagatcttcctcgacatttcggagttaccggaagacgacgaatcggagactctgacgccgcagaagaagcttcttaacaacatcgatcaggttgaggaagccgtgcgcgaagaactgaagaagctgaagagaactccgagtgcgaagaaagcagagagggaaaagcgcgttcgcacattgatgtccatgaggtga

SEQ ID NO: 38 - protein, 215 aa, Glycine max
MPESRDRRITVVDLAAAIARRRASFIYIDSPPLRTPQRTAAIGRGRASGSPGSQNTPPSTARRGRGRVPSRNVLPAWYPRTPLRDITVVVQAIERRRARSGEAEGQRIGSTDPASDRLVTEPSEPASADSAVKSPKSVGVKLRTPFGSKVPKIFLDISELPEDDESETLTPQKKLLNNIDQVEEAVREELKKLKRTPSAKKAEREKRVRTLMSMR

SEQ ID NO: 39 - DNA, 657 bp, Glycine max
atgccccaatcacgtcaccgtcgcgtaaccgtcgtcgacctcgccgcctccttagcccgccgccgcgtctcatttatcttcaacgaagctccgactctccgtacccctccaagaaccgccgccttcggtcgcggaagagctcgcgcttctccccgctcccagaacataccgccatcaactgcgcgacgtggtagaggacgcgttccgttacgctccgtgcttccggcgtggttccctaggacaccactccgtgacattactgctgtcgttcaggcgatcgagaggagaagtgcgaggctaggagaagtcgaaggccagcgaatcggaaacactgatcctgcttcagatcgtttagtttcggaaccttccgaacctgcttctgcttctgcctctgcctctgcggtgaaatcgccgaaatcagttggagtgaaactccgaacgccgttcgggagcaaggtcccgaagatcttcctcgacatatccgagttaccggaacacgacgaatcggaggctctgacgccgcagaagaagcttctcgacaacatcgatcaggttgaggaagcggtgcgcgaagaactgaacaagctgaagagaactccgagcgcgaagaaaacagagagggaaaagcgggttcgcacattgatgtccatgaggtaa

SEQ ID NO: 40 - protein, 218 aa, Glycine max
MPQSRHRRVTVVDLAASLARRRVSFIFNEAPTLRTPPRTAAFGRGRARASPRSQNIPPSTARRGRGRVPLRSVLPAWFPRTPLRDITAVVQAIERRSARLGEVEGQRIGNTDPASDRLVSEPSEPASASASASAVKSPKSVGVKLRTPFGSKVPKIFLDISELPEHDESEALTPQKKLLDNIDQVEEAVREELNKLKRTPSAKKTEREKRVRTLMSMR

SEQ ID NO: 41 - DNA, 717 bp, Medicago truncatula
atgccggaagcacgagaccgccgcgtcattcctcttgacgtggatactctattccgacgacctttctccgccgtgtttcaagaatctgagccactctccgttacacccgcacctgctccattcaccgccggtttagatctgttcttcactgaaagaactcccgtacgtcgcgaagttgctcgtgcgcgtcgttctccaggttcggaaaatactcctccgaccactgctcgccgtggaagaggccgtgctactgcatcgaggagtgcacttccgtcttggtacccgaggacgccgttgcaggatatcactgctattgttcgagcgattgagagaaggagggagagacagggaactgaggaaattgagcaaactggaacaccagttcatgctaaccagctgaccattttctctgatccatcttcattctctgctgctattggatcttcttcacgcgtccacaaaaaatcaccaaaatcctgcatcaagctgaaaacaccttatggaagtaaagttccaaaaatcatcattgacattgcaaaacttcctgctgctgaagatggtgaatctgagcttctgactcctcagaagaagctattgcattcgattgatataattgagcgtgaagtgaagcaagagttgatgaaactcaagagaacccctacagccaaaaaagcagaacatcagaaaagggttaggaccttgatgtccatgaggtga

SEQ ID NO: 42 - protein, 238 aa, Medicago truncatula
MPEARDRRVIPLDVDTLFRRPFSAVFQESEPLSVTPAPAPFTAGLDLFFTERTPVRREVARARRSPGSENTPPTTARRGRGRATASRSALPSWYPRTPLQDITAIVRAIERRRERQGTEEIEQTGTPVHANQLTIFSDPSSFSAAIGSSSRVHKKSPKSCIKLKTPYGSKVPKIIIDIAKLPAAEDGESELLTPQKKLLHSIDIIEREVKQELMKLKRTPTAKKAEHQKRVRTLMSMR

SEQ ID NO: 43 - DNA, 1044 bp, Oryza sativa
atggtgagtggttttttgagatttgggggtccgttgttttgtccattttttgatgaactgtttgctgggtgttctgatgcgtctgtttgcctctgtcgttgcagatctggtgaggtttttgaatctgagcaggaggctgaggaggatttccgggggataggaggagaaggaactctagctaggattcatacgagtagaaattacagcaatatgcctgagatgagggatagcaagaggacggcccttggcgagctctccggcggtggcgggttcttcatcaggagggtggcctcgccgggtgctcttgcggcgaggggccccgggaagccgttggctcggcggttcatacggccatcgaacaacaaggagaacgtgcccccggtttgggctgtgaaggccacagccacaaagaggagaagcccacttcctgattggtacccgaggacgccgttgcgtgacatcacggcgattgcaaaggctattcagagaagccgcttaaggattgctgctgctcagcagcgaagccagacacctgagcagaatactccccattgcactgaagttcgggactcccttgatgttgaacctggcatcaactcaactcaaattgttgcgacccctgcatctagcttggccaaggacagtctgaagattttctcctcgccatctgaaacatcacttgttaccccgtccaagccgatggatccagtccttctggatgatatggagaagaaactgtccagctcaatagagcagatagagaagatggtgaggagaaacctgaagagaactccgaaggcggcggctgctcagccttccaagagggccatccagaggcgcacactcatgcttaccattgcatggtgctctgctcgaggacctagttctaggattaacagctggaagtgccagaatattttgaagtatagcaagaatgcacaatacctgctgccaatagtgaagcaccaaaactgccatgaggaagactggggtgtccccgaaaaagagaggaaaactggagtggctgtggctgacaaagcttga

SEQ ID NO: 44 - protein, 347 aa, Oryza sativa
MVSGFLRFGGPLFCPFFDELFAGCSDASVCLCRCRSGEVFESEQEAEEDFRGIGGEGTLARIHTSRNYSNMPEMRDSKRTALGELSGGGGFFIRRVASPGALAARGPGKPLARRFIRPSNNKENVPPVWAVKATATKRRSPLPDWYPRTPLRDITAIAKAIQRSRLRIAAAQQRSQTPEQNTPHCTEVRDSLDVEPGINSTQIVATPASSLAKDSLKIFSSPSETSLVTPSKPMDPVLLDDMEKKLSSSIEQIEKMVRRNLKRTPKAAAAQPSKRAIQRRTLMLTIAWCSARGPSSRINSWKCQNILKYSKNAQYLLPIVKHQNCHEEDWGVPEKERKTGVAVADKA

SEQ ID NO: 45 - DNA, 705 bp, Oryza sativa
atgcctgaagtgagaaattccggcggtagggcggcgctcgccgacccctcgggtggtgggttctttatcaggaggacgacgtcgccgccgggagccgtggcggtcaagccgctggctcggcgggccctgccgccgacgagcaacaaggagaacgtgccgccgtcctgggctgtgaccgtgagggctacacccaagaggaggagccccctgcccgagtggtacccgaggagcccactccgcgacatcacgtcagtcgtcaaggcagttgagaggaaaagtcgcctcggaaatgctgcggttcggcagcagatccagttgagtgaagattcttcacgatctgtggatccagcaactccagtacaaaaagaagaaggtgtccctcaaagcacaccaacaccaccaactcaaaaggccctggatgctgctgccccttgtcctggctcaacccaagctgttgcaagcacatcaacagcttacttggccgagggcaagccgaaggcatcatcttcttctccatctgactgctcctttcagacaccatccagaccaaatgatccagctcttgctgatctcatggagaaggaactgtccagctccatagagcagatagagaagatggtaaggaagaacctcaagagagctccgaaggctgctcagccttccaaggtgaccatccagaagcgcaccctgttgtccatgagatga

SEQ ID NO: 46 - protein, 234 aa, Oryza sativa
MPEVRNSGGRAALADPSGGGFFIRRTTSPPGAVAVKPLARRALPPTSNKENVPPSWAVTVRATPKRRSPLPEWYPRSPLRDITSVVKAVERKSRLGNAAVRQQIQLSEDSSRSVDPATPVQKEEGVPQSTPTPPTQKALDAAAPCPGSTQAVASTSTAYLAEGKPKASSSSPSDCSFQTPSRPNDPALADLMEKELSSSIEQIEKMVRKNLKRAPKAAQPSKVTIQKRTLLSMR

SEQ ID NO: 47 - DNA, 651 bp, Oryza sativa
atgcatgaatcgaggactgcccgcaggccggctctcgccgacatctctggtggtgggttctttatcaggagagtagaatcgccaggagctgtgctggtgaaaggtgctgtcaagccgctggctcgacgcgccctgtcacagtcaagcaacaaggagaatgtgccaccagtgggagctgtgaggggtgcaccaaagaggaagagcccgttgcctgactggtacccgaggactccactccgtgacatcacatcaatcgtcaaggcaattgaaaggagaagtcgtctgcagaatgctgcaactgagcagacgatcctgtggacagaagattcttcccaatctgtggatccaataactccagcatctgcagagcagggtgtgccaacaattgagggaggtcaagctgttgcacgccatgcaacttctttgggggatggcaagctgaagacatcttcctctccatttgactgctccttgcaggccactccatccaaaccaaatgatccagctctcgcagatctcatggagaagaagctgtccaactcgatagagcagatcgaaaagatggtcaggcgaaacctgaagaaaactccgaaggccgctcagccttccaagaggaccatccagagtcgcatcctgatgtccatgcgatga

SEQ ID NO: 48 - protein, 216 aa, Sorghum bicolor
MHESRTARRPALADISGGGFFIRRVESPGAVLVKGAVKPLARRALSQSSNKENVPPVGAVRGAPKRKSPLPDWYPRTPLRDITSIVKAIERRSRLQNAATEQTILWTEDSSQSVDPITPASAEQGVPTIEGGQAVARHATSLGDGKLKTSSSPFDCSLQATPSKPNDPALADLMEKKLSNSIEQIEKMVRRNLKKTPKAAQPSKRTIQSRILMSMR

SEQ ID NO: 49 - DNA, 801 bp, Vitis vinifera
atgccggaatcaagagacagactgtcgagacctgaagacatcgcggagttgttccttcgccgtcggtccggcattcttgggattttagcagatggatcggagaggagctccaacttgttcgcgtctccttcccggcgtgagactacgacgaggacgacgacgttgggtgcacgtggagcgaccggaatcttggcatcgagagggggtggggtgggaaggggcggctttggaaccccaagaatcggaactggacgtggccgtggccgggctgtgtaccgatcgcctctgtttggtcgagagaataccccggcaaccggaagtggtcggcgaggaagaggtcgttccggaaattccgtgttgccatcttggtatccaagaacacctcttcgtgacatcactcatgttgttcgggcgattgaaaggagaagagctcgcttgagagaaattgacggtcagcaaatcgacattccaatcccccaggatatttctgatgttcatgaccccattttgcccccatctagtgctcaactcgagcaggatatttctatgatctccccaagcccaacaagcggaatgaagcttgttccaaaggctgttggtaaggtgccaaagattttgcttgatatcaccgatcagactggtggaggatcagattttctcacaccccagaagaaactcctcaattccattgacacggttgagaaggcagtgatggacgagctcgggaaattgaagcgaacgcccagtgcgaagcgggccgaacaagagaaaagggtacgcactttgatgtctatgcgttga

SEQ ID NO: 50 - protein, 266 aa, Vitis vinifera
MPESRDRLSRPEDIAELFLRRRSGILGILADGSERSSNLFASPSRRETTTRTTTLGARGATGILASRGGGVGRGGFGTPRIGTGRGRGRAVYRSPLFGRENTPATGSGRRGRGRSGNSVLPSWYPRTPLRDITHVVRAIERRRARLREIDGQQIDIPIPQDISDVHDPILPPSSAQLEQDISMISPSPTSGMKLVPKAVGKVPKILLDITDQTGGGSDFLTPQKKLLNSIDTVEKAVMDELGKLKRTPSAKRAEQEKRVRTLMSMR

SEQ ID NO: 51 - DNA, 1526 bp, Zea mays
caacaaggacagagcagaaacttagccagagattcgtccaggataggggctgtatcgtagggagtagtcgttgcggagattgggtcgaagcggactggacaggagccgagcaaactatctgcagaagaggttaaagggttgccgtgcggactccggagctgtgagaatctaccccgaggtaagctcttagagtcgtagtcaaagaggagaagccaggccgggaacaaacagaaaagtgaggagatttgttggtgcattagctactcacgcgtcccctgaaattctgcttgttaactccatcctaaaatttattgtgtggacccaggagaagagcaacaggagtacaggactcagtgcaccaagaataggaaagagcaaagaccataacagttgtatgagatactgtgatttctgggttcatttgtttatctgattatgcgttctttggtctcttgcatcactcatgtggttgtatgcactcctccaggaacttcaagatgcttgaagtgaggactgcaagaaggccggctctcgccgacatctctggtggtgggttctttatgaggacagtagaatcgccaggagctgtgctggtgaatggtgctgtcaagcggccggctcggcagtttctatcaccttcaagcaacaaggagaatgtgccaccagtgggagctttcagggctacaccaaagaggaggacccccttgcctgactggtacccgaggacaccactccgtgacatcacatcaatcgtcaaggcaattgagaggaggagaagtcgtctgcagaatgctgcagctcagcagcagatccagtggacagaagacccttcccgatctgtggatccaataactccagtacaggcagagcagggtggtgtgccaacaactgtggatggtcaaggtgttggaagccctgcaacctgtttggaggatggcaagctgaagacatcgtcctatccatcatctgactgctccttgcaggccactccatccaaaccaaacgatccagctctcgcagatctcgtggagaagaagctgtccagctcgatagagcagatcgagaagatggtgcggcgaaacctgaagagaacttcgaaggccgctcagccttccaagaggaccatccagaggcgcgtcctgatgtccatgcgatgagctgagaaagctatctgctctgccatggcttcccttgtctgctgctttcttagcagcaagtcgtaaccaaccattacgccagttttgcctgaaggaggggtggggccgtgggggctcctggttctctgcttgaggaccccggggtatgcggcttactactagctctctgcttgagggtacacattatggtgactgcgtatttttaatttgagaaattagtagttctatgtatagttttatagtgtggaacggatatgagaaattagtagcaattgtgacttcgacagcttgaatactgttgttatggagtagttcctctatactgttgtttccgagtaacataacacagttttggccatcagtaatgga

SEQ ID NO: 52 - protein, 227 aa, Zea mays
MHSSRNFKMLEVRTARRPALADISGGGFFMRTVESPGAVLVNGAVKRPARQFLSPSSNKENVPPVGAFRATPKRRTPLPDWYPRTPLRDITSIVKAIERRRSRLQNAAAQQQIQWTEDPSRSVDPITPVQAEQGGVPTTVDGQGVGSPATCLEDGKLKTSSYPSSDCSLQATPSKPNDPALADLVEKKLSSSIEQIEKMVRRNLKRTSKAAQPSKRTIQRRVLMSMR

SEQ ID NO: 53 - DNA, 939 bp, Brassica napus
cttatacaaaacgctctcaagacaaaaatggcgatggcaaaggagatctagggtttcgatggattctccttcagcgttccctcgcgcgccgcatctaaccagctctatgtccccgagcttgaccgtattgtgcttaaagacaaatctaccctccgtccctttgcgtcagtatcttccgtcaggaaaactacaatcaccacgcggatcctcgcccttatccaccaactctgcctcaggaacatccacgtcaccaagcgtgatctcttctacactgacgttaagcttttccaggaccagacacagagcgatgctgtgttggacgatgtgtcgtgtatgctcggctgcacaaggtcaagcctcaatgtaattgcagcagagaaaggtgtggtggtgggaaggctcatattcagtgacaacggagacatgatcgactgcacaaagatggggatgggtgggaaagcaattccaccgaacatcgatcgagttggagacatgcagagtgatgctatgttcatactcttagttgagaaagatgcagcttacataaggttagctgaagacagattctacaaccggttcccctgcatcatcgtcactgcaaaaggccagcccgatgtagccacaaggctgttcttgaggaagatgaaaatggagctcaagcttccggtgctcgccttggtggatagtgatccttacgggttgaagattctgtcggtttatggatgcgggtcgaagaacatgtcttacgatagtgcaaacttgactacacctgatattaagtggcttgggatcaggccaagtgatttggacaagtacaagatacctgagcagtgtaggttgccgatgacagagcaggatatcaagaccgggaaggatatgctagaggaggatttcgtgaagaagaatcccggggtgggtcgaagaacttaacctgatggt

SEQ ID NO: 54 - protein, 198 aa, Brassica napus
MLGCTRSSLNVIAAEKGVVVGRLIFSDNGDMIDCTKMGMGGKAIPPNIDRVGDMQSDAMFILLVEKDAAYIRLAEDRFYNRFPCIIVTAKGQPDVATRLFLRKMKMELKLPVLALVDSDPYGLKILSVYGCGSKNMSYDSANLTTPDIKWLGIRPSDLDKYKIPEQCRLPMTEQDIKTGKDMLEEDFVKKNPGVGRRT

SEQ ID NO: 55 - DNA, 1089 bp, Brassica rapa
atggagggaaattttcaaatttcagagacgactaatctgcttcgaaagatcaaagagtttacgcgatcgatcgttgaagatctagccgagggaaaatctccagaaatctccatcaatcgattcagaaactactgcaacgatccagaagcagactgtttttgcagctccgatgaaccgaaaggtcgggagattctcacgcttaggaagagatcgcaaacctatagaatcgatatgttgctgagagtattgttgatagttcaacaacttctccaagaaaatagacatggatccaaaagagatatctactatatgcatccatcagcattcaaagcacaatcggctgtagaccgcgcaattgctgatatatgcatcctttttcagtgtagtcgttacagcttgaatgtggtgtctgttggaaatgggttggtgatggggtggttaaagtttagggaagctggaaggaagtttgattgtttaagcagcctgaatactgcatttcccgttcctgttcttgtagaggaagtcgaagatattgttagtttggcagagtacatactggtggtggaaaaagaaacagtattccagcgtttagcaaatgacatgttttgcaagacgaaccgctgcatcgttgtcacaggaagaggctatcctgatgtttctacaagaaggttcttgcgactcttgatggagaagttgcaactacctgtgcattgtctagtcgactgtgatccatatggctttgagatcctagccacataccgttttggctccatgcaaatggcatatgatatagaatcactacgagcaccagaaatgaaatggttgggagcttttccttcggactctgacatatacggtgttccccaacagtgtctcttgcccttgacagaagaagataagaaaagaactgaagcaatgttgcttagatgctacctgaagcgtgaaatgccacaatggaggttggaacttgaaacgatgctgaaaagaggagtgaagtttgagatcgaagcactctcagttcactcactctcgtttttatcagaagtttacattccttctaaaatacgtagtgagggaagtttccattga

SEQ ID NO: 56 - protein, 362 aa, Brassica rapa
MEGNFQISETTNLLRKIKEFTRSIVEDLAEGKSPEISINRFRNYCNDPEADCFCSSDEPKGREILTLRKRSQTYRIDMLLRVLLIVQQLLQENRHGSKRDIYYMHPSAFKAQSAVDRAIADICILFQCSRYSLNVVSVGNGLVMGWLKFREAGRKFDCLSSLNTAFPVPVLVEEVEDIVSLAEYILVVEKETVFQRLANDMFCKTNRCIVVTGRGYPDVSTRRFLRLLMEKLQLPVHCLVDCDPYGFEILATYRFGSMQMAYDIESLRAPEMKWLGAFPSDSDIYGVPQQCLLPLTEEDKKRTEAMLLRCYLKREMPQWRLELETMLKRGVKFEIEALSVHSLSFLSEVYIPSKIRSEGSFH

SEQ ID NO: 57 - DNA, 1104 bp, Glycine max
atggagggaaagaggacgaggttccagtcggagtcacagccacagagcgtaattctactcacgaaaatcaaagaattcactcgagctttgctcgcagacctcaccaacggacgctcaccgctcattctcatcgatcgcttcagaagctactgcaccctttccaactccaactgcttttgtgcctccgatttgccgtgcggaaaggaacttctcacgcttcgcaggaaatcccacgcccacagactagctgtcatgttgagagtgatgctgatagttcagaaacttttgcaagagaacaagcatagttccaagagagacatttattacacctatccttctgtatttttggatcagtcggtggttgaccaagcaattaatgatatatgtattcttatgcaatgcagtcgccataaccttaatgtggtttctgcagggaacgggttaattatgggctggataagattttctgaaggagaaaggatatttgattgcataagttctcccaacactgcccaccctgttcctgttcatgttgaagaagttcaagatatcattagtcttgctcaatacatattagttgtggagaaagaatcagttttccaaaggctagcaaacgaccaattctgcaatgcaaatcactgtattgtcatcactggaagaggttacccggatattcctacaagaaggtttttgcgtcttctggttgagaatttgtgcctacctgcttattgcttggtagattgtgatccctatggctttgacatcttaaccacttacagatttggttcaatgcaaatggcctatgacacgaaacatcttcgtgtcccagagatacaatggcttggagcttttccttctgattctgagagatattttgttccgaatcagtgtctccttccattgactgctgaagacaaaagaaaagttgaagccatgctacttagatgctaccttgaaagggaggtaccacaatggaggttggagctacagttgattctgcaaagaggagtaaagtttgagattgaagccttatctgtgcacgcactttcattcttgtcagagtcttacataccatctaaaattgaaggtaaattgataatgtag

SEQ ID NO: 58 - protein, 367 aa, Glycine max
MEGKRTRFQSESQPQSVILLTKIKEFTRALLADLTNGRSPLILIDRFRSYCTLSNSNCFCASDLPCGKELLTLRRKSHAHRLAVMLRVMLIVQKLLQENKHSSKRDIYYTYPSVFLDQSVVDQAINDICILMQCSRHNLNVVSAGNGLIMGWIRFSEGERIFDCISSPNTAHPVPVHVEEVQDIISLAQYILVVEKESVFQRLANDQFCNANHCIVITGRGYPDIPTRRFLRLLVENLCLPAYCLVDCDPYGFDILTTYRFGSMQMAYDTKHLRVPEIQWLGAFPSDSERYFVPNQCLLPLTAEDKRKVEAMLLRCYLEREVPQWRLELQLILQRGVKFEIEALSVHALSFLSESYIPSKIEGKLIM

SEQ ID NO: 59 - DNA, 1254 bp, Glycine max
atggcagacaacaaaaaacgccggcgcaaggaccccgccggcgacgagctacccttcaagaacaagctgaaacccgactcagcaatcatggaaaccctaaagcagttctccgcctcctcctcctcctcctccgtctcccaaaccctaaccctccaggacctctccatccccttccggtgccgcgaggtggcagacctctccctctcctccgtgcagtccaacatcgagtccctcatcctcaggatcgcccactccatcctctccggccacggcttctctttcgacgtcccttcccgctccgccgccaaccagctctacgtgcccgagctcgaccgcatcgtcctcaaggacaaatcctcccttcgcccgtttgcgaacatctccactgtgcggaaatccgccatcaccgcccgcatcctgcagctcatccaccagctctgcatcaagggcatccatgtcaccaagcgtgacctcttctacaccgacgtcaaactcttccaggaccagatccaatctgatgctgttctggatgatgtgtcctgcatgctggggtgcactcggtccagcctcaatgtcgttgctgcggagaaaggggtggtggttgggaggttgattttcagtgacaatggggatatgatcgattgcaccaaaatggggatgggagggaaggcaattccgccaaatattgatcgagttggggatatgcagagtgatgctttgtttattttgttggtggagaaggatgctgcttatatgaggttggctgaggataggttctacaaccgttttccatgcataattgtgactgcaaaggggcagccagatgtttccactaggctgttcttgaggaagatgaagacagagttgaagctgccggtgctggctctagttgacagtgatccttatgggttgaagattctgtcggtttatggctgtgggtccaagaacatgtcttatgacagtgctaacttaaccacccctgatatcaagtggcttggggttaggcctagtgatttggacaagtacaagatacctgagcagtgtaggttgccgatgaccgagcaggatattaagactggtaaggacttgctggaggaggattttgtcaagaagaaccctggttgggtggaggaattgaccttgatggtcaagactaagcaaaaggctgaaatacaggctttgagcacttttggttttcagtatctgtcagaagtttatttgcccttgaagttgcagcagaaagattggctttga

SEQ ID NO: 60 - protein, 417 aa, Glycine max
MADNKKRRRKDPAGDELPFKNKLKPDSAIMETLKQFSASSSSSSVSQTLTLQDLSIPFRCREVADLSLSSVQSNIESLILRIAHSILSGHGFSFDVPSRSAANQLYVPELDRIVLKDKSSLRPFANISTVRKSAITARILQLIHQLCIKGIHVTKRDLFYTDVKLFQDQIQSDAVLDDVSCMLGCTRSSLNVVAAEKGVVVGRLIFSDNGDMIDCTKMGMGGKAIPPNIDRVGDMQSDALFILLVEKDAAYMRLAEDRFYNRFPCIIVTAKGQPDVSTRLFLRKMKTELKLPVLALVDSDPYGLKILSVYGCGSKNMSYDSANLTTPDIKWLGVRPSDLDKYKIPEQCRLPMTEQDIKTGKDLLEEDFVKKNPGWVEELTLMVKTKQKAEIQALSTFGFQYLSEVYLPLKLQQKDWL

SEQ ID NO: 61 - DNA, 1260 bp, Glycine max
atggcagacaacaaaaagcgccggcgaaaggaccccgccggcgacgagctccccttcaaaaacaagctgaaaccggactccgcaatcatggaaaccctaaagcagttctccgcctcatcctcctcctcctccgcctccgtctcacaaaccctaaccctccaggacctctccctccccttccgctgccgcgaggtggcggacctctccctctcctccgtgcagtccaacatcgagtccctcattctccggatcgcccactccatcctctctggccacggcttctccttcgacgtcccctcccgctccgccgccaaccagctctacgtccccgagctcgaccgcatcgtcctcaaggacaaatcctctcttcgccccttcgcgaatatctccaccgtgcggaagtccgccatcaccgcccgcattctgcagctcatccaccagctttgcctcaagggcatccacgtcaccaagcgtgacctcttctacaccgacgtcaaactcttccaggaccagatccaatctgatgctgttctggatgatgtgtcctgcatgctggggtgcactcggtccagcctcaatgttgtggctgcagagaaaggggtggtggttgggaggttgattttcagtgacaatggggatatgattgattgcaccaaaatggggatgggcgggaaggcaattccaccgaatattgatcgagttggggatatgcagagtgatgctttgttcattctgttggtggagaaggatgctgcttatatgaggttggctgaggataggttctataaccgctttccatgcataattgtgactgcaaaggggcagcccgatgtttccactaggctgttcttgaggaagatgaagatagagttaaagctgccggtgctggctctagttgacagtgatccttatgggttgaagattctgtcggtttatggctgtgggtcaaagaacatgtcttatgacagtgccaacttaaccacccctgatatcaagtggcttggggttaggcctagtgatttggacaagtacaagatacctgagcagtgtaggttgccgatgaccgagcaggatattaagactggcaaggacttgcttgaggaggattttgtcaaaaagaaccctggttgggtggaggaattgaccttgatggtcaaaactaagcaaaaagctgaaatacaggctttgagcacctttggttttcagtatctgtcagaagtttatttgcccttgaagttgcagcagaaggattggctgtga

SEQ ID NO: 62 - protein, 419 aa, Glycine max
MADNKKRRRKDPAGDELPFKNKLKPDSAIMETLKQFSASSSSSSASVSQTLTLQDLSLPFRCREVADLSLSSVQSNIESLILRIAHSILSGHGFSFDVPSRSAANQLYVPELDRIVLKDKSSLRPFANISTVRKSAITARILQLIHQLCLKGIHVTKRDLFYTDVKLFQDQIQSDAVLDDVSCMLGCTRSSLNVVAAEKGVVVGRLIFSDNGDMIDCTKMGMGGKAIPPNIDRVGDMQSDALFILLVEKDAAYMRLAEDRFYNRFPCIIVTAKGQPDVSTRLFLRKMKIELKLPVLALVDSDPYGLKILSVYGCGSKNMSYDSANLTTPDIKWLGVRPSDLDKYKIPEQCRLPMTEQDIKTGKDLLEEDFVKKNPGWVEELTLMVKTKQKAEIQALSTFGFQYLSEVYLPLKLQQKDWL

SEQ ID NO: 63 - DNA, 1248 bp, Medicago truncatula
atgaaattaaaacttgaagaagaagattctggaaaaatggagggaaagagaaagaaattggaatcaaaaaaatcagagaatgggattcttctactcgacaaaatcaaagttttcactcgaagtttgctagttaacctaaccaacagaaaatcaccgatcatcctcatcgatcgattcaaaaatcactgtactctttcagattccaactgcttctgtggctccgatttgccggttggaaaggaagttctaacactttgcaaggaaacccatgttcgcagattagatgtgatgttgagagttctggtgattgttcagaagcttttacaagagaacaaacatagttcaaaaagagacatttattacatgcatccatctgtctttttggaccagtcagttgtggaccatgctattaatgatatatgtgtcttgatgcagtgcagccgccataacctcaatgtggtttctgccgggaatgggttagttatgggctggataagatttgtcgaaggaaaaaagatatttgactgcatcagttctcccgacacctgccgagaattaacattgctttactttttgcccatagatattgtaagcgcggctcgttacatattagttgtcgagaaagaatcaggcaagcaaatgctgtattttttagggagagtcgatgttgaacttgcagttttccagagattagcaaatgaccagttctgcaaatcaaaccattgcattgtcatctctggaagaggctacccagatattcctacaagaaggtttttgcggcttcttgttgagaatttgcacatacctgcttattgcctggtagactgtgatccctatggatttgatatcttgaccacttatagatttggctcaatgggttctcaacatgaagtatacatgattgttgagtggatcaaatctttgtctaatgaccgacaaatggcttatgacacgaaacatcttcgtgtccctgagatacactggcttggagcttttccttcagattctgagagatactttgttccaaaacagtgcctccttcctttgactgctgaagacaagagaaaaattgaagccatgttgcttaggtgctacctgcaaagggaggtgccacaatggaggttggagctcaaaatgatgttgcagaaaggagtgaagtttgaaatcgaagcactgtctgttcatacactttcattcttgacagagtcttatataccatccaaaattcatggtaaagttcaaatctag

SEQ ID NO: 64 - protein, 415 aa, Medicago truncatula
MKLKLEEEDSGKMEGKRKKLESKKSENGILLLDKIKVFTRSLLVNLTNRKSPIILIDRFKNHCTLSDSNCFCGSDLPVGKEVLTLCKETHVRRLDVMLRVLVIVQKLLQENKHSSKRDIYYMHPSVFLDQSVVDHAINDICVLMQCSRHNLNVVSAGNGLVMGWIRFVEGKKIFDCISSPDTCRELTLLYFLPIDIVSAARYILVVEKESGKQMLYFLGRVDVELAVFQRLANDQFCKSNHCIVISGRGYPDIPTRRFLRLLVENLHIPAYCLVDCDPYGFDILTTYRFGSMGSQHEVYMIVEWIKSLSNDRQMAYDTKHLRVPEIHWLGAFPSDSERYFVPKQCLLPLTAEDKRKIEAMLLRCYLQREVPQWRLELKMMLQKGVKFEIEALSVHTLSFLTESYIPSKIHGKVQI

SEQ ID NO: 65 - DNA, 1146 bp, Oryza sativa
atggcggggagggagaagaggcggcgggtggcggcgctcgacggcgaagagcggcggcggcggcaggaggaagcggcgaccctcctccacaggatcagagggttggtgcgctgggtcgtcgccgaggtcgccgccggccgctccccgaccgtcgcgctccaccgctaccagaactactgctcctccgcctccgccgccgccgcgtccccatgcgcctgcagctacgacgtccccgtgggcacagatgtactctcgctcctccaccggggctcccacgcctcccggctcaatgtgctcctcagggttcttctcgtcgtgcagcaactcctgcagcagaacaagcactgctccaagagggacatctactacatgtacccctccatattccaagaacaagcggttgttgaccgtgcaatcaatgatatatgcgtactcttcaagtgcagccggcacaatctcaatgtggttcctgtggcaaaaggcttggtgatgggctggattagatttttagagggagaaaaggaagtctattgtgtaacgaatgtcaatgctgccttctctatcccagttagcatcgaagcaataaaagatgttgttagtgttgcggactacatacttattgtcgagaaggagacagtgtttcaacgtttggctaatgacaagttctgtgaaaggaatcgctgcattgtgattacaggaagaggctacccagatattccaacaagaagattcttgcgctaccttgttgaacagctgcatttgccagtttactgtttggtggatgcagacccttatggtttcgacattctggctacctacaaatttggttcactgcaattggcatacgatgcaaatttcctgcgtgtgcctgatattcggtggcttggggtcttcacatctgattttgaggattatcgccttccagactgctgcctacttcacttgtcgtctgaagacagaaggaaagctgaaggaattctctcaaggtgttacttgcacagggaagccccacaatggaggttggagttagaagccatgttgcaaaagggtgtcaaatttgagattgaggcgttatctgcatgttccatttcctttttatcagaagagtacattcccaagaagatcaaacaaggaagacatatataa

SEQ ID NO: 66 - protein, 381 aa, Oryza sativa
MAGREKRRRVAALDGEERRRRQEEAATLLHRIRGLVRWVVAEVAAGRSPTVALHRYQNYCSSASAAAASPCACSYDVPVGTDVLSLLHRGSHASRLNVLLRVLLVVQQLLQQNKHCSKRDIYYMYPSIFQEQAVVDRAINDICVLFKCSRHNLNVVPVAKGLVMGWIRFLEGEKEVYCVTNVNAAFSIPVSIEAIKDVVSVADYILIVEKETVFQRLANDKFCERNRCIVITGRGYPDIPTRRFLRYLVEQLHLPVYCLVDADPYGFDILATYKFGSLQLAYDANFLRVPDIRWLGVFTSDFEDYRLPDCCLLHLSSEDRRKAEGILSRCYLHREAPQWRLELEAMLQKGVKFEIEALSACSISFLSEEYIPKKIKQGRHI

SEQ ID NO: 67 - DNA, 1152 bp, Setaria italic
atggccgggagggacaagaggaggtgtgcggcggcactcggctgcgacaagcagcggctgcgaaggcggcaggacgcggcggcgctccttctccgcaggatcaaagggctcgtgcgctgggtcgtcaaggaggtcgccgccggccgctccccgtccatcgtgctccaccggtaccggaactactgctccgccgccgacgctgcgtccccgtccccatgtgcctgcagctacgacgcccccgtaggcacggacgtcctctccctgctccacaaggactgccacacctcccgcctcaatgtgctcctgagggtgctgctcgtggtgcagcagctcctgcagcagaacaagcactgctccaagagggacatttactacatgtacccctccattttcgtagaagtagctgttgttgaccgtgccattaatgatatctgcatactcttcaagtgcagtcggcacaatctcaatgtggttcctgtcgtgaaaggtttggtgatgggctggataagatttgtggagggtgaaaagaaagtgtattgtataacaagtgtcaatgctgctttctccatccctgttagcattgaggcaatcaaagatgttgttagtgttgctcactacatacttgtagttgagaaggagacagtgttccagcgtttggccaatgacaagttctgtgaaagaaatcgctgcatcgttattacaggaagaggctacccagatattccaacaagaagattcctgagacaccttgttgaacagctgcatctgcctgcttattgcttagtggactcagatccttatggttttgacattctggccacatataaatttggttccttgcaattggcatatgatgcaaacttgctgcgtgtacctgatatacggtggcttggggttttcacatccgactttgaggatttttgccttccagactgttgcctccttcacttgtcacctgaagataggaggaaagctgaaagtattcttgctaggtgctatttacacaaggaagccccagaatggaggtcggagctggaagcaatgttacaaaagggtgtcaagtttgagattgaggcactatctgcaagctccatttcatttttatcggacaaatacatcccccagaagatcaaacaaggaaggcatttataa

SEQ ID NO: 68 - protein, 383 aa, Setaria italica
MAGRDKRRCAAALGCDKQRLRRRQDAAALLLRRIKGLVRWVVKEVAAGRSPSIVLHRYRNYCSAADAASPSPCACSYDAPVGTDVLSLLHKDCHTSRLNVLLRVLLVVQQLLQQNKHCSKRDIYYMYPSIFVEVAVVDRAINDICILFKCSRHNLNVVPVVKGLVMGWIRFVEGEKKVYCITSVNAAFSIPVSIEAIKDVVSVAHYILVVEKETVFQRLANDKFCERNRCIVITGRGYPDIPTRRFLRHLVEQLHLPAYCLVDSDPYGFDILATYKFGSLQLAYDANLLRVPDIRWLGVFTSDFEDFCLPDCCLLHLSPEDRRKAESILARCYLHKEAPEWRSELEAMLQKGVKFEIEALSASSISFLSDKYIPQKIKQGRHL

SEQ ID NO: 69 - DNA, 1152 bp, Sorghum bicolor
atggcggggagggacaagaggcggcgagcggcgccgctcgaaggcgacgagcagcagttgcggcggaggcaggaggaggcggcgctcctcctccgcaggatcaaagggcttgtgcgctgggtcgtggaagaggttgccgccggtcgttccccgtccatagtgctccaccggtaccggaactactgctccgccgccgactctgcgtccccgtctccatgtgcctgcagctacgacgtccccgtcggcacggacgtcctctccctgctccacaatgactaccacacctcccgcctcaatgtgctcctgcgggtgctgcttgtggtgcagaaactcctgcagcagaacaagcactgctccaagagagacatctactacatgtacccctccatcttcgtagaagtagcagttgttgaccgtgccatcaacgatatctgcatactcctcaagtgcagtcggcacaatctcaatgtggttcctgtagtgaaaggtttggtgatgggctggataagattcgtggagggtgaaaagaaagtgtattgtataacaaatgtcaatgctgctttctccatccctgttgatattgaggcaatcaaagatgttgttagtgttgctcactacatacttgtggttgagaaggagacagttttccagcgtctggccaatgacaagttttgtgaaagaaatcgctgcattgttattacaggaagaggctacccagatattccaacaagaagattcctgcggtaccttgttgaacagctgcatctgcctgcttattgcctagtggactcagatccttatggttttgacattctggctacctataaatttggttccttgcaattggcacatgatgcaaacttgttgcgtgtgcctgatatacggtggcttggagtcttcacatctgattttgaagaatattgccttccagactgctgcctacttcatttgtcacctgaagataggaggaaagctgaacgtattcttgctagatgctatttacacagggaagtcccagaatggaggtcagagttggaagcaatgttgcaaaagggtgtcaagtttgagattgaggcactatctgcaaattccatttcctttttatcggatgaatacattccccagaagatcaaacaaggcatgcatttataa

SEQ ID NO: 70 - protein, 383 aa, Sorghum bicolor
MAGRDKRRRAAPLEGDEQQLRRRQEEAALLLRRIKGLVRWVVEEVAAGRSPSIVLHRYRNYCSAADSASPSPCACSYDVPVGTDVLSLLHNDYHTSRLNVLLRVLLVVQKLLQQNKHCSKRDIYYMYPSIFVEVAVVDRAINDICILLKCSRHNLNVVPVVKGLVMGWIRFVEGEKKVYCITNVNAAFSIPVDIEAIKDVVSVAHYILVVEKETVFQRLANDKFCERNRCIVITGRGYPDIPTRRFLRYLVEQLHLPAYCLVDSDPYGFDILATYKFGSLQLAHDANLLRVPDIRWLGVFTSDFEEYCLPDCCLLHLSPEDRRKAERILARCYLHREVPEWRSELEAMLQKGVKFEIEALSANSISFLSDEYIPQKIKQGMHL

SEQ ID NO: 71 - DNA, 1089 bp, Vitis vinifera
atggagggaaagcgttcaagctcacaacgcagcgatctgcttcggaagataagagagtttactcgatcaattctggatgatctctcgattggaaaatctccagtggttttgattgatcggttcagaaattattgcacagataacactggaaactgctgttgcagctctgatttgtccaagggcaaggagattctcacacttcagagggaatgtcatgcacgtagactggatgtcttgctaagagtgctattgatcgttcagcaacttctacaagaaaatagacatggatcaaagagagatatatattacatgcatccgtctgtattttcagatcagtcagttgtagaccgagcaataaatgacatatgtatccttctgcagtgcagtcgccacaacctaaatgtgagacctttgtctaagggattattggtgatgggctggttaagattcttagaagctggaaagaaatttgattgcataaatggcccaaacactgcctaccctgtccctgtgcatgttgaagaagtcaaagatattgtcagtgttgcccagtatatattggttgtggagaaagaatcagtgttccagcggttagcaaatgacaaattctgcaacaaaaatcgctgcattgttatcacaggaagaggatatccagatatccctacaagaaggtttttgcgtcttctcgtagagaagttgcatctgcatgtctattgcttggtagattgcgatccttatggctttgacatcctgacaacatatcggtttggttccatgcaaatggcctatgatgcaaaatttctacgagtcccagagatagaatggcttggagcttttccttcagactctgagaaatatggtcttccagaaccatgtcttcttcctttgacagcagaagataagaggaaaaccgaagccattttacatcgatgctatctccaacaagaattgctgcactggaggttggaactagagctgatgctgcaaagaggagtaaaatttgagatcgaagcattgtctgtgcattcactttcctttttgtccgaaaattatataccatccaagattcaagttgcagagggcgtgtaa

SEQ ID NO: 72 - protein, 362 aa, Vitis vinifera
MEGKRSSSQRSDLLRKIREFTRSILDDLSIGKSPVVLIDRFRNYCTDNTGNCCCSSDLSKGKEILTLQRECHARRLDVLLRVLLIVQQLLQENRHGSKRDIYYMHPSVFSDQSVVDRAINDICILLQCSRHNLNVRPLSKGLLVMGWLRFLEAGKKFDCINGPNTAYPVPVHVEEVKDIVSVAQYILVVEKESVFQRLANDKFCNKNRCIVITGRGYPDIPTRRFLRLLVEKLHLHVYCLVDCDPYGFDILTTYRFGSMQMAYDAKFLRVPEIEWLGAFPSDSEKYGLPEPCLLPLTAEDKRKTEAILHRCYLQQELLHWRLELELMLQRGVKFEIEALSVHSLSFLSENYIPSKIQVAEGV

SEQ ID NO: 73 - DNA, 1292 bp, Zea mays
tcttcgcgatcgattagctgattagctccatggcggcttcgaaaaaatcaaaataaaaaactagcgccatggcggggagggataagaggcgacgagcggcgccgctcgaaggcgacgagcagcagttgcggcggaggctggaggaagcggcgctcctcctccgcaggatcaaagggcttgtgcgctggatcgtcgaagaggttgccgccggccgctccccgtctatagtgctccaccggtaccggaactattgctcctccgccgactctgcgtccccgtccccatgtgcctgcagctacgacatccccgtcggcacggacgtcctctctctgctccacaaggactaccacacctcccgcctcagtacgaatacatctaaatctttgcatttatgtgatcacactaattactttctgatgcgttgttcatgcgtagatgtgctcctgagggtgctgttcgtggtgcagcagctcctgcagcagaacaagcactgctccaagagggacatctactacatgtacccctccatcttcgtagaagtagcagttgttgaccgtgccatcaacgatatctgcatactcttcaagtgcagccggcacaatctcaacgtggttcctgtagtgaaaggtttggtgatgggctggataagatttatggagggcgaaaagaaagtgtattgtataacaagcgtcaatgctgctttctccattcctgttgacattgaggcaatcaaagatgttgttagtgttgcccactacatacttgtggttgagaaggagacagtgttccagcgtttggccaatgacaagttctgtgaaagaaatcgctgcattgttattacaggaagaggctatccagatattccaacaagaagattcctgcggtaccttgttgaactgctgcatctgcctgcttattgcttagtggactcagatccttatggtttcgacattctggctacctataaatttggttccttgcaattggcacatgatgcaaacttgttgcgtgtccctgatatacggtggcttggagttttcacatctgattttgaagaatattgccttccagactgctgcctacttcgtttgtcacctgaagataggaggaaagctgaaggcattcttgctaggtgctatttacacagggaagccccagaatggaggtcagagttggaagcaatgctgcaaaagggtgtcaagtttgagattgaggcactatccgcaaattccatttcctttttatcgcatgagtacattccccagaaaatcaaacaaggcatgcatttataa

SEQ ID NO: 74 - protein, 407 aa, Zea mays
MAGRDKRRRAAPLEGDEQQLRRRLEEAALLLRRIKGLVRWIVEEVAAGRSPSIVLHRYRNYCSSADSASPSPCACSYDIPVGTDVLSLLHKDYHTSRLSTNTSKSLHLCDHTNYFLMRCSCVDVLLRVLFVVQQLLQQNKHCSKRDIYYMYPSIFVEVAVVDRAINDICILFKCSRHNLNVVPVVKGLVMGWIRFMEGEKKVYCITSVNAAFSIPVDIEAIKDVVSVAHYILVVEKETVFQRLANDKFCERNRCIVITGRGYPDIPTRRFLRYLVELLHLPAYCLVDSDPYGFDILATYKFGSLQLAHDANLLRVPDIRWLGVFTSDFEEYCLPDCCLLRLSPEDRRKAEGILARCYLHREAPEWRSELEAMLQKGVKFEIEALSANSISFLSHEYIPQKIKQGMHL

SEQ ID NO: 75 - DNA, 612 bp, Brassica napus
actgagacgtatgatcgctttgaaagatttgacatcgaaggagatgatgaaactcagttgaactttaattcaagagaaggcgctcaaatacctccaactctgatcccatcaccacctcgtcatcatgattttgctgaaggaggcaatcccacaagccctcagccccaggagcaacaagagcgcggtagggatgtatttgctgagcagacgggggagcaaaacataccggacagagaggtattttcctcactaggatacttccatctcgtgaaaaaaaaatggaaattggattttttttctgcaagtaggaccaagatataccacggccaacaaaaaaaagagcaagaaggacagctacttcagccatggattatgagcagactattatcgctggtaatcaataccagtcatggcttcaggatacttctcacattctcctgaggggaaaaaagagaaaggctcgaggacccgccagcccaagttttgaggttactaaacgtatgaagatgccacttacacaactctttgaagagcatgtggacggttcttacccacctcagctcatggagctttggtcaaaatgcactcaccctcttcaagccactacatctg

SEQ ID NO: 76 - DNA, 1845 bp, Brassica rapa
atgataatcttccgtgcatttgattatccgatgcaaagctacggagagaggatggctgctacgttgcacgcgaagatcaatcggaagaagctgaacaagctcgacatcatccaaatctgcgaagagattctcaacccgtcggttccaatggctctcagactctctgggattttgatgggtggggttgtcatcgtttacgagaggaaagtaaagctcctattcgatgacgtcactcgccttctggtagaaattaatggagcttggcgcacaaaagctgctccggatcctactttactacctaaaggacgaacccatgccaggaaagaggctgttacgttacctgacaaggacgaagctgattttggggatttcgaacagactcgtagtcagttacccaaattccccaatttcatggattttcagcagtcttatatctccatgcggttagatgaacccaatgtcaacgatatccccgagcaagaggatctccatcaagctgctgccgagaatatcacactcttcgagtatcatgcttcataccagactaatactgagacgtatgatcgctttgaaagatttgacatcgaaggagatgatgaaactcagttgaacttcaatccaagagaaggctcgcaaatacctccaactctgatcccatcaccacctcgtcatcatgattttcctgaaggaggcaatcccacaagccctcagcgccaggagcaacaagagaacggtagggatgcatttgctgagcagacggcggaacaaaacataccggacagagaggaccaagatgtaccacggccaacaaaaagaagagcaagaaggacagctacttcagccatggattgtgagcagactattatcgctggtaatcaataccagtcatggctccaggatacatctcacattctcttgaggggaaaaaagagaaaggctcgaggacccgctagcccaagtattgaggttacaaaacgtatgaagctgccagttacacaactctttgaagagcatgtggacggttcttacccacctcagctcatggagctttggtcaaaatgcactcagcctcttcaaacctctacatctgaaactggacgccctgatctctcggcggagcattctccagggtttggccaggagagaatgcaagaccaccatcaaacagaccatcatcagggcactgagacaagcttccaaaatcttggcagtcccgcagaaagacttcggaacgttcttgctgagaaagatggttctatagaaggcctgatggctcgatctcgagcaagcgctgagaataataaccaggctgctgctgatattagcgttacacctctctattctggagatgatgtgagatccatgcctagcacaccatcagcacgtggggcagcttccattaacatagagatcaactctaacagtcgcaggctcaacagaaaaaggcaacattcgtcaccaagaagaggactcgaaccagtagcggaagacagaacgtgggagcaccgtgcttatgactttgagttttcaatgatacctgaaaagggattcacagctgataacgaagtactagctgagactggacctacacaaactcaaaagccagtgaccactcacacagacgagaagataactgatagcatcaaaagtcacctcaagacgcactttgaaacacctggagctcctcaagtggaatctcttaacaagctcgctattggaatgaaaagaaacgctgcagctcaactcttctaccaatcctgtgtgctagccactcgcggagtcataaaggtggagcaaacacagccttatggggacattctcattgcacgaggacccaatatgtaa

SEQ ID NO: 77 - protein, 614 aa, Brassica rapa
MIIFRAFDYPMQSYGERMAATLHAKINRKKLNKLDIIQICEEILNPSVPMALRLSGILMGGVVIVYERKVKLLFDDVTRLLVEINGAWRTKAAPDPTLLPKGRTHARKEAVTLPDKDEADFGDFEQTRSQLPKFPNFMDFQQSYISMRLDEPNVNDIPEQEDLHQAAAENITLFEYHASYQTNTETYDRFERFDIEGDDETQLNFNPREGSQIPPTLIPSPPRHHDFPEGGNPTSPQRQEQQENGRDAFAEQTAEQNIPDREDQDVPRPTKRRARRTATSAMDCEQTIIAGNQYQSWLQDTSHILLRGKKRKARGPASPSIEVTKRMKLPVTQLFEEHVDGSYPPQLMELWSKCTQPLQTSTSETGRPDLSAEHSPGFGQERMQDHHQTDHHQGTETSFQNLGSPAERLRNVLAEKDGSIEGLMARSRASAENNNQAAADISVTPLYSGDDVRSMPSTPSARGAASINIEINSNSRRLNRKRQHSSPRRGLEPVAEDRTWEHRAYDFEFSMIPEKGFTADNEVLAETGPTQTQKPVTTHTDEKITDSIKSHLKTHFETPGAPQVESLNKLAIGMKRNAAAQLFYQSCVLATRGVIKVEQTQPYGDILIARGPNM

SEQ ID NO: 78 - DNA, 1722 bp, Glycine max
cttcttgctcgaaaggcaccactcggtcaaatatggatggctgcgacaatgcacgcaaagattaaccgaagaaagctagacaagctcaacatcatcaaaatttgcgaagagattctaaacccatcgattcctatggctcttagactttctggaattctgatgggaggagtagtgattgtctatgagagaaaagtgaagctcctttatgaggacgtgacccgttttctggttgagataaacgaagcctggaaagtaaagactgctccagatcctacattgctccccaagtccaaatccaaggccaaaaaagaggctgttactctgccagggaccggtgaaacgaacatggaagatattgaacagtcccttcagttttccaacacaggcaccacaacaggattccaacataacgcctattttactatgcgacttgataatgtggatgaacccttcactaataatggagcaagagaggaccaagatcaatcagaacttctccatcaagttgacgcagagaatattaccttatttgaacgctttgaaacgttccaagctaacacggatacatacaatcgctttgagaggtttgatattgaagaagatgaggaaacacaggtaaatgtaacttcaggagatcaaattctaaccacgcttgtaccctccccacctcatcaagacgaacccaccaaagctgatacgtttcaagaccatcatcctggacacccagacattcagcaacctagtgaaggcatgatacctagacaggaacctagaaggcgaggaccaaataaaaggaaaagaggacaaccatcggctattgaaatggattatgagcaaaccattattcctgctcacatatatcaacactggcttcagaatgcttctgacattgtctcgcgaaggggaagaaggaaaaaggcaccgaagagacagatcatgtatgatattttagcattcaaccacctcatgattcaccttcaggtcagcatagagtctctctctggggtgcctgggggaaaggatttcagcccaccatcctccagaaccatcattttcatcgcctccaggagaggaaatccttctgaagattttgacggtaggccagactaccaggcacctccaatggagaaggctcgggaacatatcctcatggatgaactgacagctagccttttgagagggcatgaagctactcctcaggtctcatctgggaaagctggaggcagtgtacattcctttccaagaccgacgtctgaaaatggtcctgcctcacattcagattttgattcgggaagaactgttcacagattcaaaaataaaaggtattcatcatctgcaaacagcagtggaggccttgagccactagctgaagatgtaaatttcaagttagctagactgtatgaagatgtatattacttgttaaggcttctctatttcttttcagaactcctcgtggaaacaggacccactcaaacacaagtaaacatcaatcatcctagtgacaagataaccgattccatccaagcgcagatgaaggcacattttgacacgcctggagctcctccagtggaatcccttcatatcctagctgctggaatgacacggacatcagcagcacaacttttctatcaaatttgtgttcttgcttcccgcgatgcgttgaaggttgaccaaaaggtgccctacggagagattctcttctctagaggattaagaatgtga

SEQ ID NO: 79 - protein, 573 aa, Glycine max
LLARKAPLGQIWMAATMHAKINRRKLDKLNIIKICEEILNPSIPMALRLSGILMGGVVIVYERKVKLLYEDVTRFLVEINEAWKVKTAPDPTLLPKSKSKAKKEAVTLPGTGETNMEDIEQSLQFSNTGTTTGFQHNAYFTMRLDNVDEPFTNNGAREDQDQSELLHQVDAENITLFERFETFQANTDTYNRFERFDIEEDEETQVNVTSGDQILTTLVPSPPHQDEPTKADTFQDHHPGHPDIQQPSEGMIPRQEPRRRGPNKRKRGQPSAIEMDYEQTIIPAHIYQHWLQNASDIVSRRGRRKKAPKRQIMYDILAFNHLMIHLQVSIESLSGVPGGKDFSPPSSRTIIFIASRRGNPSEDFDGRPDYQAPPMEKAREHILMDELTASLLRGHEATPQVSSGKAGGSVHSFPRPTSENGPASHSDFDSGRTVHRFKNKRYSSSANSSGGLEPLAEDVNFKLARLYEDVYYLLRLLYFFSELLVETGPTQTQVNINHPSDKITDSIQAQMKAHFDTPGAPPVESLHILAAGMTRTSAAQLFYQICVLASRDALKVDQKVPYGEILFSRGLRM

SEQ ID NO: 80 - DNA, 2046 bp, Glycine max
cttcttgctcgaaaagcaccactcggccaaatatggatggctgccacaatgcacgcaaagattaaccgtagaaagttagacaagctcaacatcatcaatatttgcgaggagattctgaacccatcgattcctatggctcttagactttctggaattctcatggggggagtagtgattgtctatgagagaaaagtgaagctcctttatgcgctcacgtttctgaattctccatcatttctttttttattaccttgttttctcgcagatgacgtgacccgttttctggttgaaataaacgaagcctggaaagtaaaagctgctccagatcctacattgcttcccaagtccaaatccaaggccaagaaagaggctgttactctgccagggaccggtgagacgaatgtggcagatattgaacagtcccttcagttttccaacacaggcaccacaaatggatttcaacataacgcatattttaccatgcgacttgacagtgtggatgaacccttcattagtaatggagcaagagaggaccaagatcaatcagaacttctccatcaagttgacgcggagaatattaccttatttgaacgctttgaaacattccaagctaatgcggatccttacaatcatctcttatttgaacgctttgagaggtttgatattgaaggagatgaggaaacacaggtaaacgtaacttcagcagatcaaattccaaccacgcttgtgccctccccacctcatcaagacgaacccaccagagttgcatttctttttctttcaccacatttcacttgtctgtaccctacacatatagcttatgccaatactggggttttgatggaagagactactgtaccatctagaccaaactcgttcatgacccaacctcggtatggtttgacaactccatcaaacttagttcctcatcataacttagaagcttggaaagttaccatcatcctggacacccagacattcagcaacctatataatgaccattatgttatgattgatgagaaaagaaatgaccaacgaagtgcaatgcaacaggaacctaaaaggcggggaccaaataaaaggaaaagaggacagccatcgactatagaaatggattatgagcaaaccattattcctgctcatatatatcaacactggcttcagaatgcttctgatattgtctcgcgaagaggaagaaagaaaaagatttttttaaggaaaactaaccgatgtcatgtcttcaacaaagatagccaacctcatgaagctgccacccgttctattatggacttatggattaagagcattcaaccacctcatgattcaccttcaggtcagcatagtgtgtctctctggggtgcctggggggtaaaggatttcagcccaccatcctccagaaccatcattttcatcgcctccaggaattttgacagtaggccagactaccaggcacctccaatggaaaaggctcgggaacatatcctcttggatgaactgacaactagccttttgagagggcatgaagctactcctcatatctcatcagggaaagctggagacagtgtacattcctttccaagaccaacgtctgaaaatggtcctgcctcacattcagattttgattcgggaagattcaaaaataaaaggtattcatcatctgcaaacagcagtggaggcctcgagccactaggaggccttgagccactagctgaagatgtaaatttcaagttagctagactgtatgaagatggtcccacacctgatcaagaactctttgtggaaacaggacccactcaaacacaagcaaacatcaatcatcctagtgacaagataaccgattcaatccaagcgcaaatgaaggcacattttgacacgcctggagctcctccagttgaatcccttcataacctagctgctggaatgacacggacatcagcagcacaacttttctatcaaatttgtgttcttgcttcccgcgatgcgctgaaagttgaccaaaaggttccctatggagagattgtcttctctagaggattaaaaatgtga

SEQ ID NO: 81 - protein, 681 aa, Glycine max
LLARKAPLGQIWMAATMHAKINRRKLDKLNIINICEEILNPSIPMALRLSGILMGGVVIVYERKVKLLYALTFLNSPSFLFLLPCFLADDVTRFLVEINEAWKVKAAPDPTLLPKSKSKAKKEAVTLPGTGETNVADIEQSLQFSNTGTTNGFQHNAYFTMRLDSVDEPFISNGAREDQDQSELLHQVDAENITLFERFETFQANADPYNHLLFERFERFDIEGDEETQVNVTSADQIPTTLVPSPPHQDEPTRVAFLFLSPHFTCLYPTHIAYANTGVLMEETTVPSRPNSFMTQPRYGLTTPSNLVPHHNLEAWKVTIILDTQTFSNLYNDHYVMIDEKRNDQRSAMQQEPKRRGPNKRKRGQPSTIEMDYEQTIIPAHIYQHWLQNASDIVSRRGRKKKIFLRKTNRCHVFNKDSQPHEAATRSIMDLWIKSIQPPHDSPSGQHSVSLWGAWGVKDFSPPSSRTIIFIASRNFDSRPDYQAPPMEKAREHILLDELTTSLLRGHEATPHISSGKAGDSVHSFPRPTSENGPASHSDFDSGRFKNKRYSSSANSSGGLEPLGGLEPLAEDVNFKLARLYEDGPTPDQELFVETGPTQTQANINHPSDKITDSIQAQMKAHFDTPGAPPVESLHNLAAGMTRTSAAQLFYQICVLASRDALKVDQKVPYGEIVFSRGLKM

SEQ ID NO: 82 - DNA, 1803 bp, Medicago truncatula
atgttttactcacatcagcttcttgctagaaaagcacctctcggtcaaatttggatggcggcaacgatgcacgccaagatcaacaggaagaagttgaataagctcaatatcatcaaaatctgtgaagagattctgaatccagcgattcccatggctctgagactttctggaatactcatgggaggtgttgtgattgtgtatgaacgaaaagtgaagctactctatgatgatgtttcacggcttctggttgagattaacgaagcatggaaggttaagagtgccccagatcctacagtgcttcctaaaggaaaatctcaagctaagagaaacgaaataactataccaaataaagaacgaggttccatcgaggaagacattggaaattcatatcagtccactgcaaccactgcaacgaggttccatcgtagtgcttatttttccatgcgacttgatactttggatcttggtaatgaacgaattgaggaggaagatccatcggtgcatcaccatcaagctgatccggacaatattaccttacctgaacgtttccaagctgatgcagttccacacaatcaatatgagaggtttgaaggagatgaagaaacacaagtgaatggaacttcaggggactgtgctcaatttggaaaaccatccccacctccaccaaatgaaacaacgatagatgatataattgaagaccaacatcctgagcacccggtcattcagcaatctaatgacaacatgaatgctagagaggaacctcaaaggcgaaggccagctaaaaggaaaagaggaaaaccaatacaaatggacttcgagcaaaccatgatccctagtctgaattaccaaaattggcttcaagacccttctgatttagtctcaagaagaggaggaatacaaaaggtgcagaagcgacatgatatcatgtcttcatttaagatagttaacctcatggaggtgccacctgttgcgctatatggtggcttattgtcaactgtaaacaaagatatatattatccatcatctcttcttgacttatggattaagagcactcaaccaccacatgattcaccttcagttaggatttcagcagaccatcctccagaaccatcatctacatcacctccaggagtacaaaataatgagttcacaggacatggttctgaagaatttggcgatggtaggctagacaacatactttatgattcgcaagggaagttgctgccggtaggggaagagcttccagagaacattccaggctataatggtactccccaaattcatgtcgtccagccagaaatatttccaggaggaggggacaattcatattccgtgaggacagcatctgaacatggccattcctcacattcagacttggaaggaggaagagacacaaagagaaagcgttcatcatccagaaagagtggtggagggcttcatggcttacctgagaatgaaaagttcaataggttgtctgactttgctccaacacctgatcaaggtttcttttcagaacttcttgtggagacaggtcccactccaacacaaggaaaccccaatcattctagtgacaagataaccaaatcaatccaagctcagatgaaagcacattttgacactcataaatcagcaagtggagctcctcaatttgtgtccctggatatcctagctgctggaatgaccaaaaaatcagcagctatacttttctatcaaacctgtgttcttgctacccgcgatgtccttagagttgagcaaaaggagccttatggggagattcttatcttcagaggaccagagatgtga

SEQ ID NO: 83 - protein, 600 aa, Medicago truncatula
MFYSHQLLARKAPLGQIWMAATMHAKINRKKLNKLNIIKICEEILNPAIPMALRLSGILMGGVVIVYERKVKLLYDDVSRLLVEINEAWKVKSAPDPTVLPKGKSQAKRNEITIPNKERGSIEEDIGNSYQSTATTATRFHRSAYFSMRLDTLDLGNERIEEEDPSVHHHQADPDNITLPERFQADAVPHNQYERFEGDEETQVNGTSGDCAQFGKPSPPPPNETTIDDIIEDQHPEHPVIQQSNDNMNAREEPQRRRPAKRKRGKPIQMDFEQTMIPSLNYQNWLQDPSDLVSRRGGIQKVQKRHDIMSSFKIVNLMEVPPVALYGGLLSTVNKDIYYPSSLLDLWIKSTQPPHDSPSVRISADHPPEPSSTSPPGVQNNEFTGHGSEEFGDGRLDNILYDSQGKLLPVGEELPENIPGYNGTPQIHVVQPEIFPGGGDNSYSVRTASEHGHSSHSDLEGGRDTKRKRSSSRKSGGGLHGLPENEKFNRLSDFAPTPDQGFFSELLVETGPTPTQGNPNHSSDKITKSIQAQMKAHFDTHKSASGAPQFVSLDILAAGMTKKSAAILFYQTCVLATRDVLRVEQKEPYGEILIFRGPEM

SEQ ID NO: 84 - DNA, 1638 bp, Medicago truncatula
atgttctattcacaccagcttctagctcgcaaagcacctctcggtcaaatttggatggcggcaacgatgcacgctaagatcaacaggaagaagttgaataagctcaatatcatcaaaatctgtgaagaaattctgaatccagcgattcccatggctcttagactttctggaatactcatgggaggtgttgtgattgtgtatgaacgaaaagtgaagctactctatgatgatgtttcacgacttctggttgagattaacgaagcatggaaggttaagagtgttccagatcatacattgcttcctaaaggaaaatctcaagctaagagagcggcaatcactttgccgggtaaagaacagatgactctggaagaattggaactgtcccgtcagtccaatgcaaccactacatttaatcgtactgcttatttttccatgagacttgatactttggatgaatcattccttggtaatgaaggaaatgtggaggaagatccatcggtgcatcaccatcaagctgctcccgagaatattaccctatttgaacctttccaagctgatgcggttccttacaatcggtttgagaggtttgatatcgaaggagatgacgaaacacaagtaaatgtaccttcaggggattatgctcgatttccaataccctccccccctccaccagatgaaccaaagatagatgatatagttgaagaccaacaccctgagcacccgatcattcaggaatataatgataacatgaatgctagagaggaacctcagaggcgagggccagctaaacggaaaagaggaaaaccaatacaaatggactacgagcaaaccatgatccctgctcctaattaccaaaactggcttcaaaaccctgctgatttagtctcaagaagaggaggaatggaaaagttgaggcagcgacatgatatcatgtcttcaactaagatagctaacctcatggaggtgccacctgttgctctaaatggtggcttattgtcaaggggttttgaagaatttgatggtaggttagacaacctattcaatgctccgagagagcaggtgctgccggtagacaaggagctgccagagaacatgccagtacatgaagatactcctcctgtcttatcagagaaatctgacgtatttccaagaggaggagacaacacatattccgtgggtacagcatctgatcatggtccttcctcacattcagacttggaaacaggaagattaacaaagaaaaagcgtttaaacagcaatggagggtttcatacagtacctgagaatgaaaaaatgtatgcagatttcaatcctaggtcgcctgacatgtttccaacacctgatcaagtacttcttgtggagacaggtcccacgcaaacacaaggaaatcccaatcatcctagtgacaagataaccgaatcaatccatgctcagttgaaatcacactttgacactcttaaatcagtaagtggagctcctcaatttgagtctctagatgtcttagcttctggaatgaccagaaaatcagcagctctacttttctatcaaacctgtgttcttgcgacccgcgatgtccttagagttgagcagaaggagccttatggggagattcttatctcgagaggaccaaagatgtga

SEQ ID NO: 85 - protein, 545 aa, Medicago truncatula
MFYSHQLLARKAPLGQIWMAATMHAKINRKKLNKLNIIKICEEILNPAIPMALRLSGILMGGVVIVYERKVKLLYDDVSRLLVEINEAWKVKSVPDHTLLPKGKSQAKRAAITLPGKEQMTLEELELSRQSNATTTFNRTAYFSMRLDTLDESFLGNEGNVEEDPSVHHHQAAPENITLFEPFQADAVPYNRFERFDIEGDDETQVNVPSGDYARFPIPSPPPPDEPKIDDIVEDQHPEHPIIQEYNDNMNAREEPQRRGPAKRKRGKPIQMDYEQTMIPAPNYQNWLQNPADLVSRRGGMEKLRQRHDIMSSTKIANLMEVPPVALNGGLLSRGFEEFDGRLDNLFNAPREQVLPVDKELPENMPVHEDTPPVLSEKSDVFPRGGDNTYSVGTASDHGPSSHSDLETGRLTKKKRLNSNGGFHTVPENEKMYADFNPRSPDMFPTPDQVLLVETGPTQTQGNPNHPSDKITESIHAQLKSHFDTLKSVSGAPQFESLDVLASGMTRKSAALLFYQTCVLATRDVLRVEQKEPYGEILISRGPKM

SEQ ID NO: 86 - DNA, 2136 bp, Oryza sativa
cagcgcctccactctcactcgctcatccattccctccctcctcacgatcgagaatgttctactcgcaccagctcctcgcgcggaaggctccgctcggccagatatggatggcggcgacgcttcactcgaagatcaaccggaagcggcttgacaagctcgacatcatcaaaatctgtgaggagattttgaacccgtcggtacccatggcactaaggctctccggaattctcatgggtggtgtggcgatcgtgtacgagaggaaggtgaaggctctgtatgatgatgtgtctcggtttctgattgagatcaacgaggcatggcgggtcaagccagtcgcagaccccaccgtacttcccaagggcaaaacccaagccaagtatgaagcagtaacactgccagagaatatcatggatatggatgtggagcagcccatgcttttctcagaggctgatactacaaggttccggggaatgcgtttggaggatttggatgaccaatacattaatgtcaacctagacgatgatgacttctcgcgcgctgagaatcatcaccaagctgatgcagaaaatatcaccctggctgataatttcgggtctgggcttggagagactgatgtgttcaatcgttttgagagattcgacataacagatgatgatgcaactttcaatgtcactcctgatggacacccacaggttccaagtaatctggttccttctccacctaggcaggaagactctcctcagcaacaagaaaaccatcatgctgcctcatcccctcttcacgaagaagctcaacaagggggggcatctgtaaaaaatgagcaagagcagcagaagatgaagggtcagcaacctgctaaatcatcaaagagaaaaaaacgtaggaaagatgatgaggtgatgatggataacgaccagataatgatcccaggaaatgtatatcaaacatggctgaaggatccatcaagcctcattaccaaaaggcacagaatcaacagtaaagttaatcttattcggtcaatcaagataagagacctcatggacttgcccctcgtttctctaatatcttccttggagaagtcacccttagaattttattatcctaaggaacttatgcagctttggaaggaatgtactgaagtcaagtccccaaaagctccatcttcaggagggcagcagtcatcatcaccagaacaacagcaaagaaacttgcctcctcaggcatttccaacccagcctcaggttgataatgacagggaaatgggatttcacccagtggactttgcagatgacatcgaaaaactccgaggaaacactagtggggaatatggaagagattatgatgcttttcacagtgatcatagtgttactcctggaagtcctgggctaagtcgcaggtctgcttcaagctctggtggctctggacggggatttacgcagttggatccagaagtacagttgccatccggaaggtccaagaggcagcattcatctggaaaaagctttgggaacctcgatccagttgaagaagaattcccattcgagcaagaacttagagatttcaagatgagaaggctttcagatgttgggccaactccagacctgctggaagaaatcgaacctactcaaaccccatatgaaaagaaatccaatcctatcgaccaggtcacacaatcaatccactcgtacctcaagctacactttgacaccccaggggcctcacagtctgaatcattaagtcagctagcacatgggatgactacagcaaaggctgcccgactcttctatcaagcatgcgttttagcaactcatgattttatcaaggttaaccagctggaaccatacggagacatcttgatctcgaggggaccaaagatgtgacatcctaaatgtttaatagttggacaattttctgctgttgtggttcttgcacatctcgtgttatgtatggtgtttaagtttgcacatgaagtttagaaaaacttcgaaggaaggcttgtaggtacgttgtattggggcatgtatttaacactagttttgtgtaggaaagaaattttgtaagtatgctgaatggcttgatagctggtgcaaggttaaagttatacgatacctttctttctgtatatttaagatgatg

SEQ ID NO: 87 - protein, 608 aa, Oryza sativa
MFYSHQLLARKAPLGQIWMAATLHSKINRKRLDKLDIIKICEEILNPSVPMALRLSGILMGGVAIVYERKVKALYDDVSRFLIEINEAWRVKPVADPTVLPKGKTQAKYEAVTLPENIMDMDVEQPMLFSEADTTRFRGMRLEDLDDQYINVNLDDDDFSRAENHHQADAENITLADNFGSGLGETDVFNRFERFDITDDDATFNVTPDGHPQVPSNLVPSPPRQEDSPQQQENHHAASSPLHEEAQQGGASVKNEQEQQKMKGQQPAKSSKRKKRRKDDEVMMDNDQIMIPGNVYQTWLKDPSSLITKRHRINSKVNLIRSIKIRDLMDLPLVSLISSLEKSPLEFYYPKELMQLWKECTEVKSPKAPSSGGQQSSSPEQQQRNLPPQAFPTQPQVDNDREMGFHPVDFADDIEKLRGNTSGEYGRDYDAFHSDHSVTPGSPGLSRRSASSSGGSGRGFTQLDPEVQLPSGRSKRQHSSGKSFGNLDPVEEEFPFEQELRDFKMRRLSDVGPTPDLLEEIEPTQTPYEKKSNPIDQVTQSIHSYLKLHFDTPGASQSESLSQLAHGMTTAKAARLFYQACVLATHDFIKVNQLEPYGDILISRGPKM

SEQ ID NO: 88 - DNA, 1668 bp, Setaria italic
atggctctgaggctctctgggatcctcatgggtggcgtggtgatcgtgtacgagaggaaggtgaagcttctctatgatgatgtgtctcggcttttgattgagatcaacgaggcatggcgaatcaaaccggccacggaccccaccatcctccccaagggtaaagcccaagctaagtacgaagcagtaacgcttccagaaaaaattgtgaatatggaggtggaacagcccatgattttctcagaggctgatgctaccaggttccggggaatgcgattggatgatttggacgaacagtatgttaatgtcaacctagatgatgatgacttctctcgtgctgaacatcctcaccaagctgaggcagtgaatatcaccctggtcgataattttgagtccgggcttgcagaaactgatgtgttcaatcgttttgagagatttgacatagcagatgatgagaccacagtcaatatcactcctgatgaacacccacaggttccaagtactctagttccctccccgcctaggcatgaagacccccctcagcaagaagagccatattatgctgccccatcccctgttcaagaagaacctcaacaagaggagcaagaggaacaaaagatgaagcaacagcaaccacctaaagcatcaaagcggaaagcacgtaggaaactcgaccaagtgattatggacaataaccagatgatgatcccaggaaacatatatcagacatggctgaaggacgcatctagccttgtctcaaaaaggcgtaaagttaacagcaattttgattttattcgatcaaccaagataagcgatctcatggacatgcccccggttgctctaatgtcttacttggacaagtcatcctcagaattatattatcctaagccacttgtgcagctctggaaggaatgcactgcagtcaactgtgcaaaagcttcatcttcagggcagccaccatcatcacaagaaaaacagcctagaaactcgacacctcatgaatttccacctcagactgaaggagaatatgagatggaaacaggacctcacccaatggacttcacagatggcattgaaaaactcagaggaaacgtgagtgcggagtatgacagagcttacaatactctgcatagtgaccatagtgttactcctggaagtcctgggttaagtcggaggtctggttcgagctctggtggctctggacaggggtttataccattggatccagaagtgcaattgccatcatcaggaagtggaaggtccaagaggaggcaacattcctctggaagaagcttggggaatcttgatccagttgatgaagactttccattggagcaagaagtgagggacttcaagatgagaaggctttcagattttgggccaactcctgaccttctggaagaaaccgaaccaactcaaaccccatatgagaagcgctctgatcctatcgacaaggtcacagaatcaatccagtcgcacctcaaactacattttgataccccaggtggaccgcaatctgagtcactgaatctgctagcttcagggatgaccacagccagggcagctcgactattctatcaaatgactgttttggcaacttttgattacatcaaggttactcagctggaaccgtacggggacatcttgatctccaggggagtgaagatgtga

SEQ ID NO: 89 - protein, 555 aa, Setaria italica
MALRLSGILMGGVVIVYERKVKLLYDDVSRLLIEINEAWRIKPATDPTILPKGKAQAKYEAVTLPEKIVNMEVEQPMIFSEADATRFRGMRLDDLDEQYVNVNLDDDDFSRAEHPHQAEAVNITLVDNFESGLAETDVFNRFERFDIADDETTVNITPDEHPQVPSTLVPSPPRHEDPPQQEEPYYAAPSPVQEEPQQEEQEEQKMKQQQPPKASKRKARRKLDQVIMDNNQMMIPGNIYQTWLKDASSLVSKRRKVNSNFDFIRSTKISDLMDMPPVALMSYLDKSSSELYYPKPLVQLWKECTAVNCAKASSSGQPPSSQEKQPRNSTPHEFPPQTEGEYEMETGPHPMDFTDGIEKLRGNVSAEYDRAYNTLHSDHSVTPGSPGLSRRSGSSSGGSGQGFIPLDPEVQLPSSGSGRSKRRQHSSGRSLGNLDPVDEDFPLEQEVRDFKMRRLSDFGPTPDLLEETEPTQTPYEKRSDPIDKVTESIQSHLKLHFDTPGGPQSESLNLLASGMTTARAARLFYQMTVLATFDYIKVTQLEPYGDILISRGVKM

SEQ ID NO: 90 - DNA, 1809 bp, Sorghum bicolor
atgttctactcgcatcagctcctcgcgcggaagcagccgctcggccagatatggatggcagcgacgctccactcgaagatcaaccgcaagcggctcgacaagctcgacatcatcaaaatctgtgaggagattttgaacccctcggtgcccatggctctgaggctctctggaatcctcatgggtggcgtggtgatcgtgtacgagaggaaggtgaagcttctctactctgatgtgtctcggcttctgactgagatcaacgaggcttggcggatcaaaccggccacagacaccaccgtcctccccaagggtaaagcccaagccaagtatgaagcagtaacattgccagagaaaagtatcaatatggtggtggaacagcccatgtttttctcagagactgacggtgccaggttccgtggaatgcgattggaagatctggatgaacagtattttaatgtcaatcttggtgatgatgacttctctcatgctgatcatcgtcatcaagctgaagcagtgaatataactctggtcgataattttgagtctgggtttgcagaaactgatgtgttcaatcgctttgagagatttgacatagcagatgatgagaccacagtcaatatctctcctgatgagcacccaaaagttccaagtacactggttccctcaccacctaggcaggaagaccctcctcagcaagaagaacagtatgctgctcccttccttgttcgtgaagaacctcaacaagggggaccagaggagcagaagatgaagcagcagcaaacacctaaagcatcaaagcggaaagcacgtagggaactcccacaagtaattatggacaataaccagatgatgatcccgggaaacatatatcagacatggctgaaggatgcatcaagccttgtctcaaaaaggcgtaaagttaacagtaattttaattttattcgatcaaccaagataagtgatctcatggacatccccccagtttctctaatatctcatgacaactcgtcctcagaattatattatcctaagccacttatgcagctctggaaggactgcactgaagtcaagtccacaaaagtttcttcaggagggcagcgatcatcatcacaagaacaacagccgagaaactcaccacctcatgctgggggagagtatgagatggaaacaggtggtctgccgatggacttcacagatggcattgaaaaactcagagcaaacatgagtgcagagtatgacagagcttacgatactctgcatagtgaccatagtgttactcctggaagtcctgggttaagtcgcaggtctgcttcaagctctggtggctctggacaggcgtttataccactggatgcagaagtacaattgccatcaggaagtggaaggtccaagagggggcggcattcatctgcaagaagcttggggaatcttgatactgttgaggaggattttccactggagctggaagtgatggacgtcaagatgagaaggctttcagattatgcgccaactcctgacctactggaagaaactgaaccgactcaaaccccatatgagaggcgctccaatccaatggacaaggtcacagaagcaatcatgtcgcacctcaaacttcattttgatagcccaggtgccccgcaatctgaatccttaagtcatctagctcatgggatgaccaaagccagggcagcccgactattctatcaaacaaccgttttggcaacttttgattacatcaacgttactcagctgaaacctcacggagaggaactgtacggagacatcttgatctccagaggatcaaagatttga

SEQ ID NO: 91 - protein, 602 aa, Sorghum bicolor
MFYSHQLLARKQPLGQIWMAATLHSKINRKRLDKLDIIKICEEILNPSVPMALRLSGILMGGVVIVYERKVKLLYSDVSRLLTEINEAWRIKPATDTTVLPKGKAQAKYEAVTLPEKSINMVVEQPMFFSETDGARFRGMRLEDLDEQYFNVNLGDDDFSHADHRHQAEAVNITLVDNFESGFAETDVFNRFERFDIADDETTVNISPDEHPKVPSTLVPSPPRQEDPPQQEEQYAAPFLVREEPQQGGPEEQKMKQQQTPKASKRKARRELPQVIMDNNQMMIPGNIYQTWLKDASSLVSKRRKVNSNFNFIRSTKISDLMDIPPVSLISHDNSSSELYYPKPLMQLWKDCTEVKSTKVSSGGQRSSSQEQQPRNSPPHAGGEYEMETGGLPMDFTDGIEKLRANMSAEYDRAYDTLHSDHSVTPGSPGLSRRSASSSGGSGQAFIPLDAEVQLPSGSGRSKRGRHSSARSLGNLDTVEEDFPLELEVMDVKMRRLSDYAPTPDLLEETEPTQTPYERRSNPMDKVTEAIMSHLKLHFDSPGAPQSESLSHLAHGMTKARAARLFYQTTVLATFDYINVTQLKPHGEELYGDILISRGSKI

SEQ ID NO: 92 - DNA, 1839 bp, Vitis vinifera
atgttctactctcaccagcttcttgctcggaaagctgctcttgggcagatatggcgagttgctttttatcttttacttttgatggcagcgacgatgcatgcgaagatgaaccggagaaagcttgacaagctcaacatcattaaaatctgcgaagagattttgaatccgtcggttccgatggctctgaggctctcgggaattctcatgggtggagtagtgatcatctacgagcgaaaattgatgcattgtttggagatcggatatcttcaggtggaactgaacgaagcttggaaagtaaaagcaggagcaggttcacattccacagacctcccaaagcgaaaatctcaagccaaatatgaagccgttacgctgcctgataatgaagaaggagacgctccagagattgagcggttcctcaacttctccaacacagccaccacctgtctggacaacgtggatgaaacctacattactgggaacacaggaggagaagatgtattgcaagacaaccatcaagctgacgctgataatatcactttatgggaaccttttaattcgtatcaggctgatactaatctcaataatcgtgatgaaaggttcgaggaagatggggagatccagttgaacttcactccagcagaacagatcccaagtactcttataccatctccatcccatcaaaatgagcatcaaaaaggtgatcctgctgatgaaatccaagacctgcatccagaaaaccaggttaatcagcaacctgatgagcacaaggaagttaatcaggtagagcaatctgagcaggatcaaccgagacaagggataataagaaagagaggcagaaggccagcagcctttgtcatggatgatgaacaaatcatcattcctggtaatctataccagtcatggcttcaggatccttcgaatattgtcgcaagaagaggaaaaaggagaaaggtatgtttcagtttatccctttctatattaaagatagccaaccttatggagctgccgccttcaacgcttattgatggaatattaacaagtggaactggagaaatccaatatccagcacctcttctagagctatggatgagaagtatccaactcccccatgattcaccttctggaaggaacaccccgcctcagccaccagaaccctcatcatcatcaccatcacacagagttcatcatcaaggccctgcaggatttgtaagctactctgctaaaccttttatttttgcttcaggtggagccactgtaaatgaagtaagatccttccctggctcagcatctggacatggttccccatctcatacttcggaagtaaattcaggaaggttagtacatatatcatcaaatctattcaaagtgaagaaaaaaaatgcattgaaaattttcttttggagattgagaaacaacccatatgcttgttacagaatcaacaaaaaaaggccttattcttggtctagacacagtgggagtagccttgaaccagtggatgaggagcatccatttaaccatactgatccaaatttcaagttgtcaaaactatctgagcatgaactgttggtggaaacggggccaacacagactcaaaatccaatcatccctcccccaattgaaaagatcacggattcaatccgaatgcatctgaagacacattttgacacacccggagcgccccaaagagaatccctggaccagcttgcttccggaatggacagaccaagagctgctcaactcttctatcagacttgtgttcttgctactcgtggtttcataaaagttgaacaaaacgagccttacggggacattctcatctcaagaggagcaaagatgtaa

SEQ ID NO: 93 - protein, 612 aa, Vitis vinifera
MFYSHQLLARKAALGQIWRVAFYLLLLMAATMHAKMNRRKLDKLNIIKICEEILNPSVPMALRLSGILMGGVVIIYERKLMHCLEIGYLQVELNEAWKVKAGAGSHSTDLPKRKSQAKYEAVTLPDNEEGDAPEIERFLNFSNTATTCLDNVDETYITGNTGGEDVLQDNHQADADNITLWEPFNSYQADTNLNNRDERFEEDGEIQLNFTPAEQIPSTLIPSPSHQNEHQKGDPADEIQDLHPENQVNQQPDEHKEVNQVEQSEQDQPRQGIIRKRGRRPAAFVMDDEQIIIPGNLYQSWLQDPSNIVARRGKRRKVCFSLSLSILKIANLMELPPSTLIDGILTSGTGEIQYPAPLLELWMRSIQLPHDSPSGRNTPPQPPEPSSSSPSHRVHHQGPAGFVSYSAKPFIFASGGATVNEVRSFPGSASGHGSPSHTSEVNSGRLVHISSNLFKVKKKNALKIFFWRLRNNPYACYRINKKRPYSWSRHSGSSLEPVDEEHPFNHTDPNFKLSKLSEHELLVETGPTQTQNPIIPPPIEKITDSIRMHLKTHFDTPGAPQRESLDQLASGMDRPRAAQLFYQTCVLATRGFIKVEQNEPYGDILISRGAKM

SEQ ID NO: 94 - DNA, 1126 bp, Zea mays
atcccccgcaccgcacgtctcagcccacctcctcctaccaccctcgccgcggccgcgccacacaaaagcgtcacgccgtctgacagcggggaaaaaaaaggaggccatggaggagaacattcctcacccgagggaggcacaagggcccaccgtcgcccaaccggccccggcggtcgtcacgccccgcgacgacgctctagctcccgtagcccagctgctgtcgtcctcgggcgatgatgagtcgtccgacgacgagctggaggtcgacttcgagttcccgttcgtctgcagggactcccccgcgggcacggccgccccggccgacgagctcttcgcggacggccggatcagggccttctacccggtgttcggccgcggcacggccgggtgcgtcccccgtggcggcggcggcggcggcagcggcagctgctgcacggcgctgccggccgctccgccgcgggtgaggggccagctgggtcgcctgttccaggaggagacacgggagcgcagcacctccgccagctttacggcgtcgtccgggcccgccacggacgaggacggcggcctggatggcgcggcgccggggagctactgcgtgtggcgcccgggtccgtccgcgtccgcgtcgccctccccgccgccgccgccgccgcccaggaagagcgggtccacggggtccatggcgcggtggcgccgcatcagcgacctcgtcgtgggccgcagccacagcgacggcagggacaagttcgtcttcctcgccgccgcgcccaggagggggcccaaggacaaggagcctgccgccactgccccgcccgcggtcgccgcccaccagatggcggcggcgtacctcgccaggggcgtcccaccgcggcgcacgttcctgccgtaccgcgaggagctcgtgggcttcttcgccaacgtgaacggcatcagtcggagccaccaccgtccgccgttctgacgtcttgtcagtggcctattccatcggttaattaccctgattaattaattattcggtaacgtgattagcgcttttcttagcagtagtggataagtaggcggtctgtataggtaatgattttgggtggatcacgcgacgcgatgaatggagaggtgttttctgtcg

SEQ ID NO: 95 - protein, 602 aa, Zea mays
MFYSHQLLARKAPLGQIWMAATLHSKINRKRLDKLDIIKICEEILNPSVPMALRLSGILMGGVVIVYERKVKLLYTDVSRLLTEINEAWRIKPVTDPTVLPKGKTQAKYEAVTLPEINMVVEQPMFFSEPDGAKFRRMGLEDLDEQYVQVNLDDDDFSHADDRHQAKAVNITLVDNFESGLAETDLFNHFERFDIADDETTVNITPDEYPQVPSTLIPSPPRQEDIPQQEEPYYAAPSPVHGEPQQGGPEDQEEQKMKQPPKASKRKARWEVPRVIMDNNQMMIPGNIYQTWLKDASSLVSKRRKLNSNFNFIRSTKISDLMHIPPVALISHDNLFSELCYPKPLMQLWKDCTEVKSTKASSGGQRSSSQEPQPKNSPPQAGGEYEMETGGLPMDLTDGIEKLRANMSAKYDRAYNILHSDHSVTPGSPGLSRRSASSSGGSGSAFIQLDPEVQLPSGSGRSKRGQHSSARSLGNLDTVEEDFPLEQEVRDFKMRRLSDYVPTPDLLEETEPTQTPYERRSNPMDKITETIQSHLKLHFDTPGVPQSESLSHLAHGMTKARAARLFYQIAVLATCDYIKVTQLERKGDELYGDILISRGLKM

SEQ ID NO: 96 - DNA, 769 bp, Brassica napus
gacaattgtgaggtggacgacagcatcacaaacattaatccagccacactagaggcgaatgtagatatgcaaacaaaagaaaatgagggagatgttcccatgggtgaaagtgaagcaaacataaacactagaagaagagaaagttatgtagacaacctggcggaagatgcaccgggagaggatgcaagaatggatccttttactgtagaagatgaaaccattccatatcagcaagaagaatcctcgaaatctctaaacgcaactcgagaacaatacaacgcaatggatggattcattgaacatgaggagcatactcaaggacaacatggagaggaaaatgacaacacagacaccgctcgtggagttcaagtagaaaatgctcaggaagctcccagctcttcacccaaacagacaaataaacgaagcaagagaggagcttctgacagcaatatgaaaaagcggagcaaaacggtgcatgatgaaactgaaaaggacaagcaaacgaaaacattatcacgtgaaagtggagcaaagaagcaaaccaaaggaaaagcgaacgagagaaaggagaagacgcaaaagaaaacagtaacacgtgagagtaaaatgttctcccgtaggaaaagccttgcagctgctggtactaattgggaagctggtgttagacgaaagaacaaagggatttaagtcgagaccacttgaatacttggagaggtgaaagattcttgtacggacgttgtttcacgaaagtttaacctaatggatcggg

SEQ ID NO: 97 - protein, 206 aa, Brassica napus
MQTKENEGDVPMGESEANINTRRRESYVDNLAEDAPGEDARMDPFTVEDETIPYQQEESSKSLNATREQYNAMDGFIEHEEHTQGQHGEENDNTDTARGVQVENAQEAPSSSPKQTNKRSKRGASDSNMKKRSKTVHDETEKDKQTKTLSRESGAKKQTKGKANERKEKTQKKTVTRESKMFSRRKSLAAAGTNWEAGVRRKNKGI

SEQ ID NO: 98 - DNA, 707 bp, Brassica napus
ggaatcccaactttcccaaatactttcaaattgtaaaccgcacaacctctctccctctcagctgtaacccaatcggcggagaattaaccggtgaatcagatgtcggatctgggaagcgggagctcaactctagagtcggatcccctacatgcttactcaggtctctccttgtttcctcgcacgctgaaatcaatgtccatccctcctcctcaccactccgacgctcttcagcagacgcataccctccttcaatctatgccttttgaagtttcaaaagagcatgaggagcaggcaaagtctatcttagaagatgaaagctctgaacttttaaagaaaggcgttgggagcagtgtagcgtcagaagatacggatgttggtgtgaaccctatcgctaataagcgggaaagaagaccggcgtatgaacgtaagagaggacattttactttcaagcctacgacgacgactagtgaatcacctcaaaaagaaccaacctttgatcctagtaaatatcctaaacctggagattactttgctgcctatgacagattcctgcttgctcaacgagaatggcagaagcagactggcacctttgtgaaagagacacaccagtatcagccccgccctcgcagaccagaacttccagggagaaaacggggtgcatacaagcatacttatacaagtagttatcccattgacttgaaaacttc

SEQ ID NO: 99 - protein, 202 aa, Brassica napus
MSDLGSGSSTLESDPLHAYSGLSLFPRTLKSMSIPPPHHSDALQQTHTLLQSMPFEVSKEHEEQAKSILEDESSELLKKGVGSSVASEDTDVGVNPIANKRERRPAYERKRGHFTFKPTTTTSESPQKEPTFDPSKYPKPGDYFAAYDRFLLAQREWQKQTGTFVKETHQYQPRPRRPELPGRKRGAYKHTYTSSYPIDLKT

SEQ ID NO: 100 - DNA, 672 bp, Brassica rapa
gacaacctctctctctctcagctgtaacccaatcggcggagaaattaaccggtgaatcagatgtcggatctgggaagccggagctcaactctagagtcggatcccctacatgcttactcaggtctctccttgtttcctcgcacgctgaaatcaatgtccatccctcctcctctctaccattccgacgctcttcagcagacgcataccctccttcaatctatcccttttgaagtttcaaaagagcatgaggagcaggcaaagtctatcttagaagatgaaagctctgaacttttaaagaaaggcgttgggagcagtgtagcgtcagaagatacggatgttggtgtgaaccctatcgctaataagcgggaaagaagaccggcgtatgaacgtaagagaggacattttactttcaagcctacgacgacgactagtgaatcacctcaaaaagaaccaacctttgatcctagtaaatatcctaaacctggagattactttgctgcctatgacagattcctgcttgctcaacgagaatggcagaagcagactggcaccgttgtgaaagagacacaccagtatcagccccgccctcgcagaccagaacttccagggagaaaacggggtgcattacaagcatacttatacaagtagttatcccattgacttgaaaacttc

SEQ ID NO: 101 - protein, 195 aa, Brassica rapa
MSDLGSRSSTLESDPLHAYSGLSLFPRTLKSMSIPPPLYHSDALQQTHTLLQSIPFEVSKEHEEQAKSILEDESSELLKKGVGSSVASEDTDVGVNPIANKRERRPAYERKRGHFTFKPTTTTSESPQKEPTFDPSKYPKPGDYFAAYDRFLLAQREWQKQTGTVVKETHQYQPRPRRPELPGRKRGALQAYLYK

SEQ ID NO: 102 - DNA, 510 bp, Brassica rapa
tgtccgatctgggaagcgggagctcaactctagagtcagatcccctgcatgcttactcaggtctctccttgtttcctcgcacgctgaaatcaatgtccatccctcctcctcaccattccgacgctcttcagcagacgcataccctccttcaatctatcccttttgaagtttcaaaagagcatgaggagcaggcaaagtctatcttagaagatgaaagctctgaacttttaaagaaaggcgttgggagcagtgtagcgtcagaagatacggatgttggtgtgaaccctatcgctaataagcgggaaagaagaccggcgtatgaacgtaagagaggacattttactttcaagcctacgacgacgactagtgaatcacctcaaaaagaaccaacctttgatcctagtaaatatcctaaacctggagattactttgctgcctatgacagattcctgcttgctcaacgagaatggcagaagcagactggcacctttgtgaaagagacacaccagt

SEQ ID NO: 103 - DNA, 2250 bp, Glycine max
atggagaaagaaggtgatgcattagtggatcctctctccaactattggggactttccctctttcctcaaccatctttcccaccctccaaaccctacaactcagaccaagatcttcacaccatccacactcacctcagatccatggtaataattagagtttattttagctttaattgtagcatcaccttccatttcatgcatattgtgctttcacaggccttgcggagtcccgccaaactgaagacaaatgatgctgaaggggaatttcgtcgaaacccgagaccagggttagggcttaaacgtccacgcttctctatgaagccaactaagaaagtttgctaccaactctggaccttgatagcctcaaggatccggcggaattcttcttggctcatgaacggttggaaagtaagtcactgtttgtttcttatttctcttcctgtggacgacattgcaatccgcgtggcttgtttttattttatcttattggaaatacagaagcagctgggtggtgcctcatttgagtcagatcaggataatgtggccgctagaccacgacaacgtcgaccggggcttttggggaataatcaattgccaatcaagtacaagcatcggtatccaaaagaaacctctgatgatgttctgtcctctcaagagacattagggtctcagagtcttgctcctgtgaccgagaacactgacaaaggagaggctagtatggcatcatcagaaaaagaagtaatagattcatctggtacgaaagggattgagcttgatgaattgttggatggattgcttcattgtgattctgaagatctagagggggatggggcaattactcttttgcaggagaggttacagatcaaacccattgctttagagaaattttctgttccagacttcccagataagcaaatggttgatctgaaatctctgcaagggaacaagtcaaagccaaggaaggctttatccgatattgataatttgttgaaaggaatgagtatgaatatgaataagaagacacctcttaaaaaggctgtacagtgccctgtacagcaattagcttcacccacccctccaagaagtccatttgcttcgttgtcgttgttgcagaagcacatttcacagtcaaaacaatcaatggatcctttttcagctcatgaaattgatcacttatctagcaaaaactattccccaactcatatggtaaatccagaactcaatcttgttagatctgcgaacccgtcaaatgaattgaatgcacacatgattgaagatgctattgctgaagaaaaatctgggaagtcatcaaataaactgaatgcgccctcaattcaagatataattgcagtaggtgggactagtttggctgaggacacagtcagaaatggcaccagtacttctagaaagtccatggtggataattcaagggaacctaggtttgatgttaatattctctcaaatgaacctcatgacataaatggcacccacacttctgaagtttccaaggaagataattctgggaagtcatcaaataatctgaatgtgtccttgattgaagatataattgcagtttatgggacaagtttggcagaggacacaaccagaaattgtaccagtacttttaaaaaatccatggtggataattcgagggaacccaggtttgatgttactcttgactcaaatgaacctcattttattccattgaaaatccattggcttaggatgtgcttttctgctaaaaggctatgcagaattcgtttaacctgcagtagtaatgtacctttaatgacactaactctgttgtggtgcacattagctgatcaaccaaatcctgctggatatgaagctaattctgtggataaacgtgccagaagatcagatgatgatccagaacattgtttacaggaaaagacagatggttctatggtgcctgttaatggacaaaagagagttaagtcacttgtgcaaaaagtgtccaagaataaaaaactttcgaatagacacagccttgcagctgctggtacatcatggacttctggattaaggagaagcaccaggatcaggacaaggccattggaatactggaaaggggaaagactggtgtatggccgtgtacacaaaagtttggctactgtcattggggtcaagtgtatttcaccaggaagtgatggaaaaccgattatgaaggtgaaatcttatgtatcagataaacacaaagagcttttcgagttggcatctctatattga

SEQ ID NO: 104 - protein, 749 aa, Glycine max
MEKEGDALVDPLSNYWGLSLFPQPSFPPSKPYNSDQDLHTIHTHLRSMVIIRVYFSFNCSITFHFMHIVLSQALRSPAKLKTNDAEGEFRRNPRPGLGLKRPRFSMKPTKKVCYQLWTLIASRIRRNSSWLMNGWKVSHCLFLISLPVDDIAIRVACFYFILLEIQKQLGGASFESDQDNVAARPRQRRPGLLGNNQLPIKYKHRYPKETSDDVLSSQETLGSQSLAPVTENTDKGEASMASSEKEVIDSSGTKGIELDELLDGLLHCDSEDLEGDGAITLLQERLQIKPIALEKFSVPDFPDKQMVDLKSLQGNKSKPRKALSDIDNLLKGMSMNMNKKTPLKKAVQCPVQQLASPTPPRSPFASLSLLQKHISQSKQSMDPFSAHEIDHLSSKNYSPTHMVNPELNLVRSANPSNELNAHMIEDAIAEEKSGKSSNKLNAPSIQDIIAVGGTSLAEDTVRNGTSTSRKSMVDNSREPRFDVNILSNEPHDINGTHTSEVSKEDNSGKSSNNLNVSLIEDIIAVYGTSLAEDTTRNCTSTFKKSMVDNSREPRFDVTLDSNEPHFIPLKIHWLRMCFSAKRLCRIRLTCSSNVPLMTLTLLWCTLADQPNPAGYEANSVDKRARRSDDDPEHCLQEKTDGSMVPVNGQKRVKSLVQKVSKNKKLSNRHSLAAAGTSWTSGLRRSTRIRTRPLEYWKGERLVYGRVHKSLATVIGVKCISPGSDGKPIMKVKSYVSDKHKELFELASLY

SEQ ID NO: 105 - DNA, 1278 bp, Glycine max
atggcatcattggaaaaagaagtaatagattcatctggtactgaagggaacaagctcgatgaattgttggatggattgcttcattgcaattctgaagatctagagggggatggggcaatgactcttttgcaggagaggttgcagatcaaacccattgctttagagaaattttctgttccagacttcccagataagcaaatggttgatctgaaatctctgcaaggaaacaagtcaaaaccaaggaaggctttatccgatattgataatttgttgaaaggaatgaatatgaataagaagacacctcttaaaaaggctgtacagtgccctgggcagcaattagcttcacccacccctccaagaagtccatttgcttcgttgtcattgttgcagaggcacatttcacggtcaaaacaatcagtggatcctttttcggctcatgaaattgataacttatctagcaaaaactattctctaactcatacggtaaatccagaactcaatcttgctggatctgggaacctgtcaaatgaattgaatgcacacatgattgaagatgttcatgctgttggtaagacaagcacagttttggacacagacagaaatggcaccaatacttctgaaattcccaaggaagactattctgggaagtctaatattgaggcacacatgattgaagatgatattgctgttggtaagacaagtacagttttggacacagatataaatagcatccacacttctgaaatttccaaggaagataattctgggaagtcatcaaataatctgaatgtgccctcaattgacaatatagttgcagctgatgggacaagtttggctgaggacgctgccagaaattgtaccaatgttggagtcagtggtgtggctgatagggttatggatgacaccaaggacaggtcgaatatcgaggtaaatgaatcctgtcaatctgaagacaaaacatttacagcttctatcccaacagatgacacgaatcttaatgtactcaattcactagtgcactttacattttcttttcagcagttggctgctggtacatcatggacttctggattaaggagaagcaccaggatcagaacaaggccattggaatactggaaaggagaaagaccggtgtatggtcgcgtacaccaaagtttggctactgtcattggggtgaagtgtatttcaccaggaagtgatggaaaaccgattatgaaggtgaaatcttatgtatcaaataaatacaaagagcttttcgagttggcatctctatattga

SEQ ID NO: 106 - protein, 425 aa, Glycine max
MASLEKEVIDSSGTEGNKLDELLDGLLHCNSEDLEGDGAMTLLQERLQIKPIALEKFSVPDFPDKQMVDLKSLQGNKSKPRKALSDIDNLLKGMNMNKKTPLKKAVQCPGQQLASPTPPRSPFASLSLLQRHISRSKQSVDPFSAHEIDNLSSKNYSLTHTVNPELNLAGSGNLSNELNAHMIEDVHAVGKTSTVLDTDRNGTNTSEIPKEDYSGKSNIEAHMIEDDIAVGKTSTVLDTDINSIHTSEISKEDNSGKSSNNLNVPSIDNIVAADGTSLAEDAARNCTNVGVSGVADRVMDDTKDRSNIEVNESCQSEDKTFTASIPTDDTNLNVLNSLVHFTFSFQQLAAGTSWTSGLRRSTRIRTRPLEYWKGERPVYGRVHQSLATVIGVKCISPGSDGKPIMKVKSYVSNKYKELFELASLY

SEQ ID NO: 107 - DNA, 1887 bp, Medicago truncatula
atgccaatgtcagaggacgacttgggattctgtacagaaaattcaactcaagatgtgggaaatcatgattttgcttctcaagaggatggagaattacctcgaaaacggagacccggtttaggcctcaatcgtgcacgcccacgtttctcccttaagccgaccaaaaaaccctctgttgaggatttgttaccgattcttgacttgaaaaaactgacagatcccgaggaattcttcatggcccatgaacggttggaaaatgcaaaaagagaaatagaaaagcagttgggtattgtgtcatctcagccaagtcaggattcaactaaaccacgggaacgtcgaccgggacttcctgggtttaatcggaggccagttagatacagacatagggtttcaacagaagctttggtcaataatgatgatgtcctatcctcccaagaggcatttgaatccgacggtcttgatcctgttggtgataacactgacaaaggcaaattttctcttgcatcattggataatgaagtaactgattcaccagctattgaagagaataagatgaatgacattttgaaaggattgcttgattgtgattctgaagaacttgagggtgaaggagcaatgaatcttttgcaggagaggttacaggtcaaatcgattgttttcgagaaattatctgttccagacttcctagatatccaacctattgatctgaaatctttgcaagggactttgtcgaagccaagcaaaggaaaggctttttctgacgtagataattggttgaaaggaatgaatattcagacacctcttagacggagtgtaggatacgctgagaagcagttagcttcacccacaccaccaaaaagtccatttgcttcattgtcatcattacaaaagcacatttcacggtcaaagctatctacggatccattttcaactcatgaaattgaccttgtacctacaagaagctattcaccaattcacatggcagaccaggaagtcgatattgttggttctagtaagctgtcggatgagctgactgcacctacaaccgaagatgttattgctgctggtgagaaaaatacaattccggagacttctgaaaattccaaggaacacaattctaggaatccatcagatgaagttaatgcgcccataattgaagatattgtggacaatcctgacagaaattgcaccattactcctcaaaagtccatggttgataattcaaccgaacctgggtttaatgctaatgttgactcgaatgaacctgctgttgacatggatgtggatattggtcgtagtggtatgggaaaaagggttatggatgacacagaaggaaggcaaaatgttgagccaaatgaaccttttcattttgatgacaacacgctggaagaaaacatgcagggatttacaagttctataccaacagatgacgcgaatctgaacacggagcttccactagctgatcaatcaaatccagttacctatcaagccaattctatggacaaagggtctagaagatcagatgatggtccagaacagtgtttacaggaaaagacaattggttctgcggcacctgttaatgggcaaacaatagttaaatcatgtatgcgaaaagggtccaagggtaagagacttctgaggaagagccttgcagatgctggtacatcatgggagtctggagtaaggagaagcaccaggttcaggacaaagcctttggaatattggaaaggagaaagaatggtgtatggccgtgtacacgagagtttgagtactgtcattggggtgaagtgcatgtctcctggaagtgatgggaaaccaaccatgaaggttaaatcatttgtgtcagataaatacaaagagctttttgagatagcttctgaatattga

SEQ ID NO: 108 - protein, 628 aa, Medicago truncatula
MPMSEDDLGFCTENSTQDVGNHDFASQEDGELPRKRRPGLGLNRARPRFSLKPTKKPSVEDLLPILDLKKLTDPEEFFMAHERLENAKREIEKQLGIVSSQPSQDSTKPRERRPGLPGFNRRPVRYRHRVSTEALVNNDDVLSSQEAFESDGLDPVGDNTDKGKFSLASLDNEVTDSPAIEENKMNDILKGLLDCDSEELEGEGAMNLLQERLQVKSIVFEKLSVPDFLDIQPIDLKSLQGTLSKPSKGKAFSDVDNWLKGMNIQTPLRRSVGYAEKQLASPTPPKSPFASLSSLQKHISRSKLSTDPFSTHEIDLVPTRSYSPIHMADQEVDIVGSSKLSDELTAPTTEDVIAAGEKNTIPETSENSKEHNSRNPSDEVNAPIIEDIVDNPDRNCTITPQKSMVDNSTEPGFNANVDSNEPAVDMDVDIGRSGMGKRVMDDTEGRQNVEPNEPFHFDDNTLEENMQGFTSSIPTDDANLNTELPLADQSNPVTYQANSMDKGSRRSDDGPEQCLQEKTIGSAAPVNGQTIVKSCMRKGSKGKRLLRKSLADAGTSWESGVRRSTRFRTKPLEYWKGERMVYGRVHESLSTVIGVKCMSPGSDGKPTMKVKSFVSDKYKELFEIASEY

SEQ ID NO: 109 - DNA, 2897 bp, Oryza sativa
gggagctctccgccaccccgcgcggcggcgagatcgaggcgccgccgccgccgtatggcctcggctgatcccttcctagccgcatcgtccccggcgcacctcctcccccgaaccctcggccccgccgcgccgcccgggaccgccgcgtccccctccgcggcccgcggggcgctgctcgacggcatctcccgaccactgaaagggtccaaggagctagttgagcaggctagaatggcgatgaaggctgtcggggacatagggaagctctatggcggcgatggagcgggggtggctgccgccgctgcggatggcaagaacaaccagctggggagaaggcctgcgccggaccgcaagcgatttcggctcaagaccaagccccccgcgaacaaaccggtgcaaaatgtggactacacagagttactgaacattgaagatcctgatgaatactttttgaccctggaaaagctcgaaagagctgataaggagattaaaaggttaaggggtgaggttccaactgaaggaacatataataaccgaggcattgaaccacctaagctacgacctgggctgttgaggagaaaatcagtccattcttacaagtttagcgccagctctgatgccccagatgccattgaagcacctgcttcccaaacagaaactgtgacagaatcacagactacccaagatgatgtgcatggctcagctcatgaaatgacaacagagcctgtttcttcaagatctagccaagatgctataccagatatctcagcgagagaagattcatttgtttggaaggataacagtttcaccttgaattacttactctccgcattcaaagatctggatgaagacgaagaagaaaatttactccgaaagactttacagattaaagaaataagcataggaaaagtttgtctccctgacttcaatgttccaggtgacacgcctgcaagcaacactactgagcagaaaaatcccatgagtgatcatgcattagaaagaactgcacctggaagcaaccttgctcgaatttcacaattggagaaacgcatttttgttggagatgccctggaagataaacatgcagatctttcaaaagatgatgaatctgatgggtctccggaaagtctgctgtgtaaacaatcacctgtgcgacgttcatctgatgcagtgggtttgatgatcaatgagggctctactgcaatggagaccccaagtcctagcatcaaatctccagagcatgtgcttgaatctgaatcgaaccctccagatggtgtaacaacagatgaacagccaacagaaaattcaccaattggtgtggacagagatagtgaacttgtcaaagagaagggcacatcttccaggcatagtgtttcgttagaggaagatgttatgccaatagattgcacggtttctcctcccgatcatttggaaggtggctcgactgaagtgttgacgaacattacaagtagaaatgtatctccattgcatcatggagatggcaattctgaacatcaggaaatagttggaggtgatgtggcccaagataatccgatccatacactggaaacacccccagaagatactccacagaatcaatctgaaatacatcgtggaagcattgagaaactggcagttgataaaagcaacgcactctccccaagtcaagggaagcaacatagaggcaaaaataagaagcagccatcgaagagaggaaaaagagagacagataatccgatccatacatcagaaacacccccaatggatactaatccacagaatcaatctgaaatacatcgtggaagcattgagaaactggcagttgataaaagcaatgcactctccccaagtaaaggcaaggaacaaagaggcaaaaataagaagcagccatcgaagagaggaaaaagaaagacagacaacctgatccatacaccggaaatacccccagaagatacagacaacacagtacatacaccggaaattcctccagaagatacttatccacagaatcaatctgaaatacatcgtggaaacactgagaaactggcagttgatataaacaatgcactctccccaagtaaaggcaaggaacaaagaggaaacaataagaagcagccatcaaagcgacaaaaaagagcagcaggtgaggcaggtgatttggaaacacacgcaccaaactttgaaccagagattcaacctcatgtgcaggacacagatgttgagcaacagccagcttgtacaagccagtcaccatcaccgagtaatggtacgagtaaaaatgaagttcgaaagagaaataagaagcaagatttgaacagaagaaaaagcttggcagatgcgggtcttacttggcaagcgggtgttagacgaagcacacgaatacggtcaaaacctttgcagcattggcttggtgaaagatttatatatgggcgtatacatggaacaatggccacagtcatcggtgttaaatcattctctcctagtcaggaaggcaaaggcccattgagggtgaaatcctttgttcctgaacagttctcagatttgttagccgaatctgccaagtactgaggtcctggcccgggaaagtccctatcttcctttctttggacaagttgcattcttcgacatgcatggctcgcgcaacctgtgatctgttccgtatctatgtgttacttttgctgttaatttttcgtcatttgaggtgcttcctcctatattgtagagctaactctgtgtagaagtgtttgtatctgtggagttgcagtgtaatgcatacatgctatgaacttgcatacatgatttattttttttaaaaggaagctgctcggagtcggggcccgggactgcccattttcatttgtagctgttgtgtgttttcaaaaggtaatttcgcatga

SEQ ID NO: 110 - protein, 837 aa, Oryza sativa
MASADPFLAASSPAHLLPRTLGPAAPPGTAASPSAARGALLDGISRPLKGSKELVEQARMAMKAVGDIGKLYGGDGAGVAAAAADGKNNQLGRRPAPDRKRFRLKTKPPANKPVQNVDYTELLNIEDPDEYFLTLEKLERADKEIKRLRGEVPTEGTYNNRGIEPPKLRPGLLRRKSVHSYKFSASSDAPDAIEAPASQTETVTESQTTQDDVHGSAHEMTTEPVSSRSSQDAIPDISAREDSFVWKDNSFTLNYLLSAFKDLDEDEEENLLRKTLQIKEISIGKVCLPDFNVPGDTPASNTTEQKNPMSDHALERTAPGSNLARISQLEKRIFVGDALEDKHADLSKDDESDGSPESLLCKQSPVRRSSDAVGLMINEGSTAMETPSPSIKSPEHVLESESNPPDGVTTDEQPTENSPIGVDRDSELVKEKGTSSRHSVSLEEDVMPIDCTVSPPDHLEGGSTEVLTNITSRNVSPLHHGDGNSEHQEIVGGDVAQDNPIHTLETPPEDTPQNQSEIHRGSIEKLAVDKSNALSPSQGKQHRGKNKKQPSKRGKRETDNPIHTSETPPMDTNPQNQSEIHRGSIEKLAVDKSNALSPSKGKEQRGKNKKQPSKRGKRKTDNLIHTPEIPPEDTDNTVHTPEIPPEDTYPQNQSEIHRGNTEKLAVDINNALSPSKGKEQRGNNKKQPSKRQKRAAGEAGDLETHAPNFEPEIQPHVQDTDVEQQPACTSQSPSPSNGTSKNEVRKRNKKQDLNRRKSLADAGLTWQAGVRRSTRIRSKPLQHWLGERFIYGRIHGTMATVIGVKSFSPSQEGKGPLRVKSFVPEQFSDLLAESAKY

SEQ ID NO: 111 - DNA, 2271 bp, Setaria italic
atggacgctgccgaccccctccgtgccatctcctctccggcccgactccttccccggaccctcggccccgccgccaccgcggcctccccctcgaaggcccgcgaggtgctcctcgaggccatctcccgcgcccgactgctgaaaggatccaaggagctggttgagcaggccagaatggtattgaagggacacggggacatccggatgctctaccatgatgatggagtgaaagtcgccccccatgcaaatggcacgaaagaccagcagggaagaaggccaggaccagaccgcaaacggtctcggttcactcaaaaggcccatgaaaggaagctggtgcctgctgttgatcactctaacgtactgaagattaaggatccaaacgagtactataagaaattggatgatattgaagaagctgagaaggagataagacggttaaatggtgaggttgttgatgagatggtaatgaattttgatcctgtagtagaacccaagaggcgctctactttgctggggagaaaatcagtccgtactttcaagtttgctgatgctgatactcaagatccaactgaggtaccagcttcccaaacagaaactatgacaggatctcagctctcgcaagatgatgcgcatgcctcgtttgctgaaaaaaatgagcagtctgttcctccaagatctggccaatgtgctatttcagatgtttcagagaaagaagattcattagctgagaaggatggagatgatctgacttatgtactggcctcactcaaaaatctggatggatctgaagaggaagactttctccgaaagatcttaaagatgcgcaaaatagagaaagaaaatgtttgtctccacaactctgttcctgaagataggccacgaagaagcaatactgcacggaaaaaatcaatgagggttcctccagaaaatcctttgccccagagttgccagagtcgcgtttcagagttagagaaacatttatttcctggagttgcagggaatgataaatgtgcagatctacaggaagatgatgaatctgaaggttcaccagatattgtgatgggtgaacaatcattggtgcatgattcatctgatgttttggtgactgatgagacctttgctgcaagtgaaattgataaggagaccccaaatctgggtgtcaaagctgcagatcatgttattgatccagaaccaaacatgccagatcgtgcaggtgaaaggcaggcaggaggttccccacttggtttgtatactgcaagtgaatatgacagggagaccccaaatctgggggtcaaagctgcagaacatgttcttgatccagaaccaatcatgcctgatcatgcagatgaaaggcaagcagaaggttccccacttggtttgtacagcaatacagaagttgccaaagaaaaggctgcatgcagcaggagcgatatttctatggaagacaatgtgccaatagacaatcctactgatatgtctaataatgaaacagaagtttcttctcctcatcatttggagggcagcttggccgaagtgttggccaggacaccagttagaaatgtggcttcagatggtgttgatcagacttctcatgcagctgaggacaacattcaacatcttgaagcggttgaagaggatggtgttatacaagataagtcaagtcatccatccgaggtgcctctagaagatattgatccagtgaatcagcctcagatgcatgatggaaacaataagaaattggcagctgatctgagcaatgcagtgtccccaatcaaagagaagaagcgacaggcagctcgaaaaggaaaaaagaagcaacaatcaaagaggagccaaaaagtggcagatgaatctaaccacccactggaaatatcccaagcaaattttgattcggagaatcaatctcgtatggatgagaacattgagcaacagagagttgttacgagtagtgcactgtcgccaaacaaagctaaggggcaaaagggagctcaaatgagaaacaggaccaaacatttgaatcaaagaaaaagcctcggagatgctggccttgcgtggcagtctggagtgagaagaagcacaagaatccgctcaaggcctttggagcattggcgtggtgaaagatttgtatatgggcgcatacatgataccatggccacagttattggcatcaaagcatactctcctggtcaagatggcaagaaaactttgaaagtgaaatcctttgtgcctgaacagtattccgatcttgttgctgaatctgcgaagtactga

SEQ ID NO: 112 - protein, 756 aa, Setaria italica
MDAADPLRAISSPARLLPRTLGPAATAASPSKAREVLLEAISRARLLKGSKELVEQARMVLKGHGDIRMLYHDDGVKVAPHANGTKDQQGRRPGPDRKRSRFTQKAHERKLVPAVDHSNVLKIKDPNEYYKKLDDIEEAEKEIRRLNGEVVDEMVMNFDPVVEPKRRSTLLGRKSVRTFKFADADTQDPTEVPASQTETMTGSQLSQDDAHASFAEKNEQSVPPRSGQCAISDVSEKEDSLAEKDGDDLTYVLASLKNLDGSEEEDFLRKILKMRKIEKENVCLHNSVPEDRPRRSNTARKKSMRVPPENPLPQSCQSRVSELEKHLFPGVAGNDKCADLQEDDESEGSPDIVMGEQSLVHDSSDVLVTDETFAASEIDKETPNLGVKAADHVIDPEPNMPDRAGERQAGGSPLGLYTASEYDRETPNLGVKAAEHVLDPEPIMPDHADERQAEGSPLGLYSNTEVAKEKAACSRSDISMEDNVPIDNPTDMSNNETEVSSPHHLEGSLAEVLARTPVRNVASDGVDQTSHAAEDNIQHLEAVEEDGVIQDKSSHPSEVPLEDIDPVNQPQMHDGNNKKLAADLSNAVSPIKEKKRQAARKGKKKQQSKRSQKVADESNHPLEISQANFDSENQSRMDENIEQQRVVTSSALSPNKAKGQKGAQMRNRTKHLNQRKSLGDAGLAWQSGVRRSTRIRSRPLEHWRGERFVYGRIHDTMATVIGIKAYSPGQDGKKTLKVKSFVPEQYSDLVAESAKY

SEQ ID NO: 113 - DNA, 2085 bp, Sorghum bicolor
atgaatgccgccgaccccctctgcgccatctccttgcctgcgcgactccttccgcggacccttggccccgcctccgccaccgggccttccccctcgaaggccggcgacgcgctcctcgaggccatcgcagtctcccggtcgctgaaagggtctgaggagcttgttaagcaggctaaaatggtgctgaaggagcacggggacatccagcctctctaccatgatgatggagtgcaagtgaggccccctgtaaatggcagcaaagagcaacagggaggaaggccagcactgaaccgcaaacgggctagattcactatgaaggacactgcaagcaaaccgacgcctgttgtggatcaatctaagttgacgaatatttcagatccagtcgaatactttatgaccttggaccagcttgaagaagctcaggaggagatccaacggctaaatggcgcagcagaaaaatgcgtattaaaatttgatcctgtagatcaaccaaagagacagcctggtttatgtgggagaaaatcaatccgcagtttcaagataattggggatgctgatactcaagatcccattgaggtaccggcttcccaaacaacaactttgacaggatctcaggtctcacaggatgttgtgcatgctgttgctgacaaaaatgaacaatgtgttcgttcaagttctgctgaagctatttcagggaaagaagattcattaactcagaaggatggccgtgacgattttacttatttactgaactcactccaacatttggatgaatctgaagaggaagggtttatcctcaagaccttagggattggagagccaaggaaggaaagagttagtttccgtaactccattcctggagttaggtccctaagaagcaataatgaacaaaaaggttcaatgagggctcaccctttagaaagtcctttgcttcagcctcttcaggatcgaatttcagagttggagaaacatttatttcctggaggcgcagcagatgctaaatgcacagatgatgaatctgaaggttcaccagatattgcgatgggcgaaccatcattagtgcatgattcttctgatgttccgatggttgatgagaactttactggaagtgaaattgacagggagaccccaaatctgggtgccagagcagcagaccatattcttgatcctgaaccatccgatcatgcatatgaaaggcaacccggaggttcctcagttggtttgtgcagagacacagaagttgccaaagaaaacgaggcatgcaggaggagcaatatttctatggaggaagatgatgtgccaatagactatccaactattggcagatctaccagtgaaacagaagcttcttctcatcatctggagggaaggtcgacagaagaattgggtatcaataggactttacatacagctgaggatagcattcaacatctagaagtggtgaaagaaggtggtgttctacaagataagtcaagccagtcattggagatgcctctggaagatattgatccagtgaatcagcctcagatgcatggtggaagcactaagaaattggcacctgatttgtgcaatgcactgtccttaaccaaacagaagaagcaacaagcagcccaagaagggaaaatgaagaaacagtcaaagaggggcaaaaaagtggctgatgaatctagccttgcactggaaatatcacaagcaaatttggattcggagaatcaacctcataatgatgatcagaacattgagcaacatacagtgttgagtagcacactgtcgccaaaccacgataaggggcaaaagggagctcaaaggacaaacaagaccaaaaaactgaatcaaagaaaaatccttggagatgctggccttgcacagccgtctggagtgagaagaagcacaagaacacgctcaaggcctttggagcattggcttggtgaaagattactatatgggcctataaatgacactttgcctgcagttattggcatcaaatcatactctcctggccaagacggcaagaaaacattgaaagtgaaatctttcgtgcctgaccagtattcagatcttgtcgctaaatccgcgaagtactaa

SEQ ID NO: 114 - protein, 694 aa, Sorghum bicolor
MNAADPLCAISLPARLLPRTLGPASATGPSPSKAGDALLEAIAVSRSLKGSEELVKQAKMVLKEHGDIQPLYHDDGVQVRPPVNGSKEQQGGRPALNRKRARFTMKDTASKPTPVVDQSKLTNISDPVEYFMTLDQLEEAQEEIQRLNGAAEKCVLKFDPVDQPKRQPGLCGRKSIRSFKIIGDADTQDPIEVPASQTTTLTGSQVSQDVVHAVADKNEQCVRSSSAEAISGKEDSLTQKDGRDDFTYLLNSLQHLDESEEEGFILKTLGIGEPRKERVSFRNSIPGVRSLRSNNEQKGSMRAHPLESPLLQPLQDRISELEKHLFPGGAADAKCTDDESEGSPDIAMGEPSLVHDSSDVPMVDENFTGSEIDRETPNLGARAADHILDPEPSDHAYERQPGGSSVGLCRDTEVAKENEACRRSNISMEEDDVPIDYPTIGRSTSETEASSHHLEGRSTEELGINRTLHTAEDSIQHLEVVKEGGVLQDKSSQSLEMPLEDIDPVNQPQMHGGSTKKLAPDLCNALSLTKQKKQQAAQEGKMKKQSKRGKKVADESSLALEISQANLDSENQPHNDDQNIEQHTVLSSTLSPNHDKGQKGAQRTNKTKKLNQRKILGDAGLAQPSGVRRSTRTRSRPLEHWLGERLLYGPINDTLPAVIGIKSYSPGQDGKKTLKVKSFVPDQYSDLVAKSAKY

SEQ ID NO: 115 - DNA, 2318 bp, Zea mays
atggacgctaccgaccccctctgcgccatctcctcgactgcgcgactccttccgcggacccttggccccgcccccgccatcgggccttccccctcgaaggcccgcgacgcgctcctcgaggccatcgcactcgcccggtctctgaaagggtctgaggagctggttaagcaggctacaatggtgccgaaggaacacggggacatccaggctctctaccatgatgatggagtgaaaggcaggcctcctgcaaatggcagcaaagagcaacagggaagaaggccagcactggatcgtaaacgggctcggtttgctatgaaggacactggaagcaaaccggtgcctgttgtggatcaatctaagttatcaaatatttcagatccaatcacattcttcatgaccttggatcggcttgaagaagccgaggaggagatcaaacggctaaacggagaggcagaaaaacgcacattgaattttgatcctgtagatgaacccattagacagcctggtttacgtgggagaaaatcagtccgcagtttcaaggtaattgaggatgttggtactcaagatcccattgaggcaccggcttcccaaacagcaactatgacaggatctcagttgtcacaggatgttatgcatgctgttgcgggcaaaaatggacgatctgtttcctcaagatctagtgaagctatttcagagaaagaagtttcattagctgagaaggatggccgtgacgatttgacttatatactgacctcaatccaagatttagatgaatctgaagaggaagagtttatccggaagaccttagggattaaagaaacaaggaaggaaagagttggtcttcgtaactccattcttggagttaggtccctaagaagcaatactgaacaaaaaggttcaatgaaggtccaccctccagaaagtcatttgcctcagactcgccaagatcgaatttcagagttagagaaacatttgtttcctggaggtgcagcaaatgctaaatgcacagatgatgaatctaaagggtcaccagatattgtgatgggtgaaccatcattggtgcattattcttctgatgttctgatgactgatgagaactttactgcaagtgacgttgacagggagaccccaaatctgggtgccagagcagcagaccctgttcttgatcctgaaccaaacttgcctgatcatgcatatgaaaggcaacctggaggttcctcacttggtttgtacagagacacagaagttggagttgccaaagaaaatgagacatgtagcaggagcattatatctgtggaggaagatgatgtgccaatagactatataactattggcaggtctactgatgaaacagaagtttcttcttctcatcctttggagggtagctcgacagaagaattggtcactaaaccagttagacatgcggctccagatggtatctgtaggacttcacatgcagctgaggatagcattcaacatctagtaacggtcaaagagggtggtgtcctacaagataagtcaagccagttgttggagatgcctcaggaagatattaatccactgaatcaggctcagatgcatggtggaagcactaagaaatcggcacctgatctatccccgaccaaacagaagaagcaacaagcagttcaagaaaggaaaaggaagcaacagtcaaagaggggaaaaaagtggctgaaacagacaattacgagtagcacaccttcaccaaatggtgccaaggggcaaaagagagctcaaaggagaaaccagaccaaaaaaaggaatcaaagaaaaatccttggagatgctgaccttgcatgccagcctggagtgagaaaaagctcaagaacacgctcaaggcctttggagtattggcttggtgaaagattactatatgggcctatacatgacaatttgcatggagctattggcatcaaagcatactcccctggccaagatggcaagagatcattgaaagtgaaatctttcgtgcctgaacagtattcagatcttgttgctaaatctgcaaggtattgaagccaagattttccaaagaggatcacgccttgtgacctgttgctttgtcacctcactatgtgatgttgacatgtattggtagaactgcagtactgcacaacgaaatgcatgttaacttaggcaggtatcaaatggatgagtatctagtttggatgcgctactacccattcggctactcgctacgtggagtctaaggtgtcaattgacatttgcatgtatacatagtggtacttgatagtaagacagttttaggttcagactcttgaaaattgattttgttt

SEQ ID NO: 116 - protein, 678 aa, Zea mays
MDATDPLCAISSTARLLPRTLGPAPAIGPSPSKARDALLEAIALARSLKGSEELVKQATMVPKEHGDIQALYHDDGVKGRPPANGSKEQQGRRPALDRKRARFAMKDTGSKPVPVVDQSKLSNISDPITFFMTLDRLEEAEEEIKRLNGEAEKRTLNFDPVDEPIRQPGLRGRKSVRSFKVIEDVGTQDPIEAPASQTATMTGSQLSQDVMHAVAGKNGRSVSSRSSEAISEKEVSLAEKDGRDDLTYILTSIQDLDESEEEEFIRKTLGIKETRKERVGLRNSILGVRSLRSNTEQKGSMKVHPPESHLPQTRQDRISELEKHLFPGGAANAKCTDDESKGSPDIVMGEPSLVHYSSDVLMTDENFTASDVDRETPNLGARAADPVLDPEPNLPDHAYERQPGGSSLGLYRDTEVGVAKENETCSRSIISVEEDDVPIDYITIGRSTDETEVSSSHPLEGSSTEELVTKPVRHAAPDGICRTSHAAEDSIQHLVTVKEGGVLQDKSSQLLEMPQEDINPLNQAQMHGGSTKKSAPDLSPTKQKKQQAVQERKRKQQSKRGKKWLKQTITSSTPSPNGAKGQKRAQRRNQTKKRNQRKILGDADLACQPGVRKSSRTRSRPLEYWLGERLLYGPIHDNLHGAIGIKAYSPGQDGKRSLKVKSFVPEQYSDLVAKSARY

SEQ ID NO: 117 - DNA, 2806 bp, Zea mays
gaaaaatttaggggtaacggttgcggatagccttacccttccccatcctcactctcccgtcatccagcctagtagcctaccgtttcaatttttgaactcccggtccggcaaccctccccagccagcgttccactcactccggcatcgcttcgaatctccgcgcggcggcgggaccgcgtgaccgacgcgcggcgctgccccttcagaaagccgcatggacgccgccgaccccctctgcgccatctcctcgactgcgcgactccttccgcggacccttggccccgccattgggccttccccctcgaacccccgcgacgcgctcctcgaggccatcgcactcgcccggtctctgaaagggtctgaggagctggttaagcaggctacaatggtgccgaaggagcacggggacatccaggctctctaccatgatgatggagtgaaaggctggcctcctgcaaatggcagcaaagagcaacagggaagaaggccagcactggatcgtaaacgggctcggtttgctatgaaggacactggaagcaaaccggtgcctgttgtggaccaatctaagttatcaaatatttcagatccaatcacattcttcatgaccttggatcggcttgaagaagccgaggaggagatcaaacggctaaatggagaggcagaaaaacgcacattgaattttgatcctgtagatgaacccattagacagcctggtttacgtgggagaaaatcagtccgcagtttcaaggtaattgaggatgttggtactcaagatcccaatgaggcaccggcttcccaaacagcaactatgacaggatctcagttgtcacaggatgttatgcatgctgttgcgggcaaaaatggacgatctgtttcctcaagatctagtgaagctatttcagagaaagaagtttcattagctgagaaggatggccgtgacgatttgacttatatactgacctcaatccaagatttagatgaatctgaagaggaagagtttatccggaagaccttagggattaaagaaacaaggaaagaaagagttagtcttcgtaactccattcttggagttaggtccctaagaagcaatactgaacaaaaaggttcaatgaaggtccaccctccagaaagtcatttgcctcagactcgccaagatcgaatttcagagttagagaaacatttgtttcctggaggtgcagcaaatgctaaatgcacagatgatgaatctgaagggtcaccagatattgtgatgggtgaaccatcattggtgcattattcttctgatgttctgatgactgatgagaactttactgcaagtgacgttgacagggagaccccaaatctgggtgccagagcagcagaccctgttcttgatcctgaaccaaacttgcctgatcatgcatatgaaaggcaacctggaggttcctcacttggtttgtacagagacacagaagttggagttgccaaagaaaatgagacatgtaacaggagcaatatatctgtggaggaagatgatgtgccaatagactatataactattggcaggtctactaatgaaacagaagtttcttcttctcatcctttggagggcagctcgacagaagaattggtcactaaaccaggtagacatgcggctccagatggtatctgtaggacttcacatgcagctgaggatagcattcaacatctagaagcggtcaaagagggtggtgtcctacaagataagtcaagccagttgttggagatgcctcaggaagatattaatccactgaatcaggctcagatgcatggtggaagcactaagaaatcggcacctgatctatccccgaccaaacagaagaagcaacaggcagttcaagaaaggaaaaggaagcaacagtcaaagaggggcaagaaagtggctggtgaatccctggaaataccccaaacaaattttgaatcggagaatcaacctcataatgacgatgtcaacattgagaaacagacaattacgagtagcacactctcaccaaatggtgccaaggggcaaaagggagctcaaaggagaaaccagaccaaaaaaaggaatcaaagaaaaatccttggagatgctgaccttgcatgccagcctggagtgagaaaaagctcaagaacacgctcaaggcctttggagtattggcttggtgaaagattactatatgggcctatacatgacaatttgcatggagctattggcatcaaagcatactctcctggccaagatggcaagagatcattgaaagtgaaatctttcgtgcctgaacagtattcagatcttgttgctaaatctgcaaggtactgaagccaagattttccaaagaggatcacgccttgtgacctgttgctttgtcacctcactatgggatgttgacatgtattggtagaactgcagtactgcacaacgaaatgcatgttaacttaggcaggtatcaaatggatgagtatctatctagtttggatgcgctactacccattcggctactcgatacgtggagtctagggtgtcaattgacattggtacttgatagtaagacagttttaggttcagactcttgaaaattgattttgtttgtcttctcgttttcagatttaagatgcgataccacagataaaaatcttgggtaattggaggtaaaaaaaaggatagcacacctaaatatcataatgatgttatgatttttttattcagtgttatggctcatgccgtcaaggtatcatgtggtgtgatagtatcttgatgttaagatctgtggcgtcgatgccaatatttatagcaccaagctttaat

SEQ ID NO: 118 - protein, 701 aa, Zea mays
MDAADPLCAISSTARLLPRTLGPAIGPSPSNPRDALLEAIALARSLKGSEELVKQATMVPKEHGDIQALYHDDGVKGWPPANGSKEQQGRRPALDRKRARFAMKDTGSKPVPVVDQSKLSNISDPITFFMTLDRLEEAEEEIKRLNGEAEKRTLNFDPVDEPIRQPGLRGRKSVRSFKVIEDVGTQDPNEAPASQTATMTGSQLSQDVMHAVAGKNGRSVSSRSSEAISEKEVSLAEKDGRDDLTYILTSIQDLDESEEEEFIRKTLGIKETRKERVSLRNSILGVRSLRSNTEQKGSMKVHPPESHLPQTRQDRISELEKHLFPGGAANAKCTDDESEGSPDIVMGEPSLVHYSSDVLMTDENFTASDVDRETPNLGARAADPVLDPEPNLPDHAYERQPGGSSLGLYRDTEVGVAKENETCNRSNISVEEDDVPIDYITIGRSTNETEVSSSHPLEGSSTEELVTKPGRHAAPDGICRTSHAAEDSIQHLEAVKEGGVLQDKSSQLLEMPQEDINPLNQAQMHGGSTKKSAPDLSPTKQKKQQAVQERKRKQQSKRGKKVAGESLEIPQTNFESENQPHNDDVNIEKQTITSSTLSPNGAKGQKGAQRRNQTKKRNQRKILGDADLACQPGVRKSSRTRSRPLEYWLGERLLYGPIHDNLHGAIGIKAYSPGQDGKRSLKVKSFVPEQYSDLVAKSARY

SEQ ID NO: 119 - DNA, 2551 bp, Zea mays
gtcactcactcgggagtcactctcccgtcctgatgccccgtttcaatttttgaactcccgatctggcaatccccacccacgctcccgagcaactttctactcactccggcgtcgcttcgaatcccagcgcggcggcgtgacgcgtgaatgcgtgatcgacgcgcggcgctgctcctccgggaaaccgcatggacgccgccgaccctctctgcgccatcacctcgcctgcgcggctccttccgcggacccttggccccaccccctcgaaggtccgcggtgcgctcctcgaggccatcgcactcgcccggtcgcggggtctgaggagctggttaagcaggctgcaatggtgctgaaggagcacggggacatccagactctctaccatgatgatgcaatgaaagccatgccccccacaaatgtcagcaaagggcaacagggaagaagggcagcactggatcgcaaacgggctcggttcactatgaaggacactggaagcaaagcggtgcctgttgtggatcgatctaagttattgaatatttcggatccagtcgcattcttcatggccttggatcggcttgaagaagctgaggatgagatcaaacggctaaatggagaggcagaaaagcgcatattgatttttgatcctttagacgaacccattagacagcctggtttgcgtgggagaaaatcattccgcagtttcaaagtaactgaggatgctactactcaagatcccattgaggtactggcttcccaaacagcaactatgacaggatctcagttctcacaggatgttatgcatgctgttgctgacaaaaatgaacagtctgttccttcacgatctggtgaagctatttcagatgtttcaggaaaagaagattcattagctgagaaggatggccgtgatgatttggcttatttactgacctcgatccaagatttggatgaatctgaagaggaagcatttatccggaagaccttagggcttaaagaaataaggaagggaagagttagtctctgtaactccattcctggagtcaggtccttaagaagcgatactgaacaaaaaggttcaatgaaggttcgccctccagaaagtcatttgcctcagactcgccaagatcgaatttcagagttggagaaacatttatttcctggaggtgcagcaaatgctaaatgcacagatgatgaatctgaagggtcaccagatattgtgatgggtgaaccatcattagtgcatgattcttccgaggttctgatgaccaatgagaactctactggaagtgaaattgacaggaggaccccaaatctgtgtgccagagcagcagaccacgctcttgatcctgaaccaaacttgcctgatcatgcatacgaaaggcaaaccagaggctcctcacttggtttgtgcaaaaacacagaagttgccaatgaacacgaggaagatgatgtacacatagaatatccaactactggcgggtctacttatcaaacagaagtttcttctcatgatttggagggcagcttgacagaagaattggtcagtgaaccaggtaggcatgcggctccagatgatatctataggacttcacatgcagctgaggatagcattcaacatctagaagtggtcaaacagggtggtgttctacaagacaagtcaagccagtcgttggagatgcctctggaagatattgatccactatatcggcctcagatgcatggtggaagcactaagaaatcgacacctgttctgtgcaatgcactgtccccgatcgaacagaagcaacaagcagctcaagaagggaaaaggaagcaacaggcaaagagggtaaaaaaagtgtctgatgaatctagccatgcactggaaatatcccaagcaaatttcgaaccggagaatgaacctcataatgttgacgtgaacatggagcaaccgacagttatgagtagcgccaaggggcaaaagggagctcaaaggagaaacaagaccaaaaaattgaatcaaagaaaaatccttggagatgttgaccttgcgcggcagtctggagtgagaagaagctcaagaatacgctcgaggcctttggagtattggcttggtgaaagattactatatgggccgatacaggacactttgcctgcagttattggcatcaaagcatactctcctggccaggatggcaagaaaacattgaaagtgaaatctttcgtgtctgaacagtattcagatcttgtcgctcaatttgcgaagtactaaacaagacaccatttttctaagaggatcacgccttgtgacttgttgctttgtcacctgactttatgatgttacatgtgttggtggaaccatagtactgcacaatgaaaaggcacacgtcctaccgaatggttgccagtatctatcttgtttggatgccatttcggctattcgatcggtggagtgtagcgtatgtgcagcggtatcacattagggatcgattcggataggcatggaatccaatagacataacattatttatcatattttaattcgaatttagatacgaatgtagattttatcgtt

SEQ ID NO: 120 - protein, 634 aa, Zea mays
MVLKEHGDIQTLYHDDAMKAMPPTNVSKGQQGRRAALDRKRARFTMKDTGSKAVPVVDRSKLLNISDPVAFFMALDRLEEAEDEIKRLNGEAEKRILIFDPLDEPIRQPGLRGRKSFRSFKVTEDATTQDPIEVLASQTATMTGSQFSQDVMHAVADKNEQSVPSRSGEAISDVSGKEDSLAEKDGRDDLAYLLTSIQDLDESEEEAFIRKTLGLKEIRKGRVSLCNSIPGVRSLRSDTEQKGSMKVRPPESHLPQTRQDRISELEKHLFPGGAANAKCTDDESEGSPDIVMGEPSLVHDSSEVLMTNENSTGSEIDRRTPNLCARAADHALDPEPNLPDHAYERQTRGSSLGLCKNTEVANEHEEDDVHIEYPTTGGSTYQTEVSSHDLEGSLTEELVSEPGRHAAPDDIYRTSHAAEDSIQHLEVVKQGGVLQDKSSQSLEMPLEDIDPLYRPQMHGGSTKKSTPVLCNALSPIEQKQQAAQEGKRKQQAKRVKKVSDESSHALEISQANFEPENEPHNVDVNMEQPTVMSSAKGQKGAQRRNKTKKLNQRKILGDVDLARQSGVRRSSRIRSRPLEYWLGERLLYGPIQDTLPAVIGIKAYSPGQDGKKTLKVKSFVSEQYSDLVAQFAKY

SEQ ID NO: 121 - DNA, 851 bp, Brassica napus
caaaaaaggcgaagcggtgttcgattcaatgaacttgaatcctcagcttttcctcaacgaaacactcaacaccgtcgaggacattgtcggcgaggcttttgacttctatacactcgaagcatccaatctcctcaaaatcgatggacgagctgataataataggtcacgggagttagcgaaaggtattgatcgtgttcgtggtatgattcaatcggttctggaagaccgcttgaggatgtgggaagcctactgtcttcgatacacttttgcagttcctgaagattttgtgctgcctgagagtgatgcccaaaatatccaacctttgccaaatgaccaagacttggatgcggaattggattccctaaggcgtaagcttcttttggtacgaaacaggtctgttgagcttaactcggagctccaggctttggaaagaagatctgtttcaaatgaactgtctgcaagactcgttaatgaagtttcaaagctttatgatgaatcatccgtgaacgatatgtccaaagagatgacaaaagttgcatcagaacttcgcgcagcgatcaataggctcaaaacaccaagaacgaatgctgctgaaacagctacaggggagaggctaaagaacaatggaattgattttccggcaacggctctcggtggaaagattgaagagcttgacaaatttctggccgagttaagaaagatgtgaaaatgttacaacattcgcctttgaactctgccgttttgtaaactactagcttggcttgaaacactacgttgtttttgacttaccaaatggccacttctccgcatttcaaatgtttgttttgtaacatacaaaatgatcctacgca

SEQ ID NO: 122 - DNA, 658 bp, Brassica napus
gagggttggaagaaactaaacggagggagaagaatggaaggcagcaaagggcaagcggtgttcgattcaatgaacttgaatcctcagcttttcataaatgaaacactcaacaccgtcgaggacattgtcggcgaggcttttgacttctatacactcgaagcatccaatctcctcaaaatcgatgataataggtcactggagttagcgaaaggtattgatcgtgttcgtggtatgattcaatcggttctggaagaccgcttgaggatgtgggaaacctactgtgttcgatacacttttgcagttcctgaagattttgtgctgcctgagagtgatggccaaaatatccaacctttgcctaatgaccaagagttggatgctgaattggattccctaaggcgtaagcttcattcggaacgaaacaggtctgttgagcttaactcggagctccaggctttagaaagaagatctgtttcaaatgaacagtctgccatactcgttaatgaagtttcaaagctttttgatgaatcatcggtgaacgatatgttcaaagagatgacaaaagttgcatcagaacttcgcgcagggatcaataatctgaaaacaagaagaatgaaggctgctgacggagctacagtacagaacaatggaaatgattttt

SEQ ID NO: 123 - protein, 208 aa, Brassica napus
MEGSKGQAVFDSMNLNPQLFINETLNTVEDIVGEAFDFYTLEASNLLKIDDNRSLELAKGIDRVRGMIQSVLEDRLRMWETYCVRYTFAVPEDFVLPESDGQNIQPLPNDQELDAELDSLRRKLHSERNRSVELNSELQALERRSVSNEQSAILVNEVSKLFDESSVNDMFKEMTKVASELRAGINNLKTRRMKAADGATVQNNGNDF

SEQ ID NO: 124 - DNA, 693 bp, Brassica rapa
atggaaggcagcaaagggcaagcggtgttcgattcaatgaacttgaatcctcagcttttcataaatgaaacactcaacaccgtcgaggacattgtcggcgaggcttttgacttctatacactcgaagcatccaatctcctcaaaatcgatgataataggtcactggagttagcgaaaggtattgatcgtgttcgtggtatgattcaatcggttctggaagaccgcttgaggatgtgggaaacctactgtgttcgatacacttttgcagttcctgaagattttgtgctgcctgagagtgatggccaaaatatccaacctttgcctaatgaccaagagttggatgctgaattggattccctaaggcgtaagcttcattcggaacgaaacaggtctgttgagcttaactcggagctccaggctttagaaagaagatctgtttcaaatgaacagtctgccatactcgttaatgaagtttcaaagctttttgatgaatcatcggtgaacgatatgttcaaagagatgacaaaagttgcatcagaacttcgcgcagggatcaataatctgaaaacaagaagaatgaaggctgctgacggagctacagtacagaacaatggaaatgatttttgggcaacggctcccgatgcaaagattgaagagcttggcaaatttctggccgagttaaaaaagatgtga

SEQ ID NO: 125 - protein, 230 aa, Brassica rapa
MEGSKGQAVFDSMNLNPQLFINETLNTVEDIVGEAFDFYTLEASNLLKIDDNRSLELAKGIDRVRGMIQSVLEDRLRMWETYCVRYTFAVPEDFVLPESDGQNIQPLPNDQELDAELDSLRRKLHSERNRSVELNSELQALERRSVSNEQSAILVNEVSKLFDESSVNDMFKEMTKVASELRAGINNLKTRRMKAADGATVQNNGNDFWATAPDAKIEELGKFLAELKKM

SEQ ID NO: 126 - DNA, 750 bp, Glycine max
atggaagggagtgagagtgaggccgtgtttggtgctctttatctgaacccgcaactcttctgtaacgaagttctcaacatcatcgacgatgtgctccaagaagctttcaatttcttcttccaggacgcatcgaggaagctcaacatcgaaagcacccaaaggtcccagcttctgaaaaagggtgttgattgcgttcggcagagagttcaatctgttttggacaaaaagcttgctacttgggagagttacatccttcgtcactgttttgctcttccccaaggttttcgtgtgccaaacacagatgatgcaaatgagaatgctcttgattcaggcgctccttttgatccagatatagatgcccagttggattcattgagagaaaaactaattgaggtggggaaggagtctgaaatgcttaatcaagaaattcaagcattagaaagaaagtctattgtcaatgcagctggacatatcaatgaagctgtacaattgtatgagcaaaattcaatgcatgaggtgtttcaggagattgtgacgaccgcctcagaacttggaacgaagatgggaaagctaaactccagcatgattgaagagactgaccaaacaaaaactaaaaggatttacagcacacaaatggatccatctgctataaatcctgttaaaggcctctcaaacatgaagttagacgatgttgaagaattttgtaagtgttatgaagagtatgtgaacttgtctttttcatcaatctag

SEQ ID NO: 127 - protein, 249 aa, Glycine max
MEGSESEAVFGALYLNPQLFCNEVLNIIDDVLQEAFNFFFQDASRKLNIESTQRSQLLKKGVDCVRQRVQSVLDKKLATWESYILRHCFALPQGFRVPNTDDANENALDSGAPFDPDIDAQLDSLREKLIEVGKESEMLNQEIQALERKSIVNAAGHINEAVQLYEQNSMHEVFQEIVTTASELGTKMGKLNSSMIEETDQTKTKRIYSTQMDPSAINPVKGLSNMKLDDVEEFCKCYEEYVNLSFSSI

SEQ ID NO: 128 - DNA, 726 bp, Glycine max
atggaagagggtgacagtgaggccatttttggtgctcttaatctgaacccgcaactcttctgtaacgaagttctcaacattgtcgacgatgtgctcgacgaagctttcaatttcttctaccaggacgcatccacgaagctcaacatcgaaggcacccaaaggtcccaggatctgaaaaagggtgttgattgcgttcggctgaatgttcaatctgttttggacaaacaacttgctgcttgggagagttacatcctccgtcactgttttgctcttccccaaggttttcgtatgccaaacaccgatgaatcaaatgagaatgccctagatccaggtgctccttttgatccagatatagatgcccagttagattcattgagagaaaaactaattgaggtggggaaggagtctgaaatgcttaatcaagaaatgcaagcattagaaagaaagtctgctgtcaatgtggctggacatatcaatgaagctgtacaattatatgagcaaaattctatgcatgaggtgtttcaggagattgtgacgaccgcctcagaacttggagcaaagatggcaaagctaaactctagcatgattgaagagactgaccaaacaaaaactaaaaggatttacagcacagaaatggatctatctgctataaatcctgctaaaggcctgtcaaacatgaagttagacgatgttgaagaatttgtaagtgttatgaagagtatgtga

SEQ ID NO: 129 - protein, 241 aa, Glycine max
MEEGDSEAIFGALNLNPQLFCNEVLNIVDDVLDEAFNFFYQDASTKLNIEGTQRSQDLKKGVDCVRLNVQSVLDKQLAAWESYILRHCFALPQGFRMPNTDESNENALDPGAPFDPDIDAQLDSLREKLIEVGKESEMLNQEMQALERKSAVNVAGHINEAVQLYEQNSMHEVFQEIVTTASELGAKMAKLNSSMIEETDQTKTKRIYSTEMDLSAINPAKGLSNMKLDDVEEFVSVMKSM

SEQ ID NO: 130 - DNA, 732 bp, Medicago truncatula
atggaaggaagtgagagcgaggccgtttttgaatcggtgatgaatctgaatccacaactcttcttcaacgaagttctcaacaccgttgacgatttcttcatcgatactttcgatttctacttccaggaagcatccaccaagctcaatgctgaagctactcaaagatcccaacatctcacacagggtgttgattgcattcgacaaaaggttcaatctgttttggatcaaaagctcactgtttgggaaaaatactgtctttatcactgtttttctcttccccaaggctttcaattaccaaacactctcaatggtgaaagaagtgcgaatgacattaatcctggttctacttccgatctagaactagatgctcagttagaatcattgaggaaaaaactagctgaggtggggaaagagtctgaaatgctgaatcaagaaattcatgcattagagagtcagtcttctcacaatgctcggtatatcaacgaggcagtacaattatttgagcaaaactcttacactgagttgtttcaggagattatgacaaccgcctcagaacttcaactcaagataggaaagctaaccaccaacaagattgaagggaccggaaaaatgaaagcaaaaaggattgacaacaataaaatggacatttctgctatatatgcttctaaaggcctctctaatacaaaatttgaagatcttcaagaatttgtaactcttatgaagagtacttga

SEQ ID NO: 131 - protein, 243 aa, Medicago truncatula
MEGSESEAVFESVMNLNPQLFFNEVLNTVDDFFIDTFDFYFQEASTKLNAEATQRSQHLTQGVDCIRQKVQSVLDQKLTVWEKYCLYHCFSLPQGFQLPNTLNGERSANDINPGSTSDLELDAQLESLRKKLAEVGKESEMLNQEIHALESQSSHNARYINEAVQLFEQNSYTELFQEIMTTASELQLKIGKLTTNKIEGTGKMKAKRIDNNKMDISAIYASKGLSNTKFEDLQEFVTLMKST

SEQ ID NO: 132 - DNA, 750 bp, Medicago truncatula
atggcgggaatggaaggaagcatgagcagcgagagcgatgcgattttcgaatcggtgatgaatttgaatccacaactcttcttcaacgaagttctcaacactgttgatgatttcgtcctcgatactttcgatttctacttccaggaagcatccaccaagctcaatgctgaagctactcaaagatcccaacatctcacacagggtgttgattgcattcgacaaaaggttcaatctgttttggatcaaaagctcactgtttgggaaaaatactgtctttatcactgtttttctcttccccaaggctttcaattaccaaacactctcaatggtgaaacaagtgggaatgacattaatcctggttctacttctgatccagaattagatgctcaattagaatcattgaggaaaaaactagctgaggtggggaaagagtctgaaatgctgaatcaagaaattcatgcattagagagtcagtcttctcacaatgctcggtatatcaacgaggcagtacaattatttgagcaaaactcttacactgagttgtttcaggagatcatgactaccgcctcagaacttcgaatgaagatgggaaagcttaacaccaacatgattgaagagacaggaaaagtgaaagcaaaaaggattgacaacaataaaatggacatttctgctatatatgcttccaaaggcctatctaatacgaaattcgaagatcttcaagaatatgtaactcttatgaagagcacgtga

SEQ ID NO: 133 - protein, 249 aa, Medicago truncatula
MAGMEGSMSSESDAIFESVMNLNPQLFFNEVLNTVDDFVLDTFDFYFQEASTKLNAEATQRSQHLTQGVDCIRQKVQSVLDQKLTVWEKYCLYHCFSLPQGFQLPNTLNGETSGNDINPGSTSDPELDAQLESLRKKLAEVGKESEMLNQEIHALESQSSHNARYINEAVQLFEQNSYTELFQEIMTTASELRMKMGKLNTNMIEETGKVKAKRIDNNKMDISAIYASKGLSNTKFEDLQEYVTLMKST

SEQ ID NO: 134 - DNA, 1108 bp, Oryza sativa
ctcccaaaaagtggccgcggaaaatttcgaattccccccacccgtcgtcggcggcgaccgcgggtgcccaagcccaaccccccgccgccgctcccctcgccgtccgccgacccacaccaccaccactcaggaccccctcataccaggcatggaggagagcgacgagaccgccgtggaggcggcgctggggctgagcgcctcgttcttcgtcaactcggtcctcaacgcggtcgacgacgtccgctacggggccttcgagtactgcctccaggaaggcgcccccgaggccgtcggcgccgccatggcgacccagaaggccgaggagctggagcggggtgtaatcagcattcacaacttggtgaaggatgtattggataagagaatgagcaattgggagaaatactgccttcgacattgtttcgcaatacctgaaggattcctgacacgtgaagatgatattcctgcaaaaaaatcactcaatgatgggaattctgattcggatctcgatgctgaacttgtttctcttaggaaaaaacttgaagatgctaacaatgaatctgaagaacttcaaaaagagctttcttccttagaaagacaagctgagtgccagagaaatttggattcctctatggctgaattattgaaggtgtttgaaagcaaggcctttcaagacaattttcaagatcttgtgaacgtaataccactatttcagcggaaactggaaggtatgaaaaggaagattgttgagaacattgacgatcaaattgattggaacgtcaatggacaccacaagcggttagcatcaggtttcactgccagaacagaagacagtcaagatgttgtgaatgtcttaaagaagtattagtagctcccacttttatgcgacctgtgcgataacaggacgcctgctatgtgctatccttcgtagcacgggataagctggttatatgtttggactcttgctaactgagtaccgccaatgcagatcttcaatgtaatcctgaactgcgattccttccgaacaatttgtacgtaaacgtaaagtacatgggctttccataattggtttatacgtggttatttctccggatggccggatagaaccact

SEQ ID NO: 135 - protein, 238 aa, Oryza sativa
MEESDETAVEAALGLSASFFVNSVLNAVDDVRYGAFEYCLQEGAPEAVGAAMATQKAEELERGVISIHNLVKDVLDKRMSNWEKYCLRHCFAIPEGFLTREDDIPAKKSLNDGNSDSDLDAELVSLRKKLEDANNESEELQKELSSLERQAECQRNLDSSMAELLKVFESKAFQDNFQDLVNVIPLFQRKLEGMKRKIVENIDDQIDWNVNGHHKRLASGFTARTEDSQDVVNVLKKY

SEQ ID NO: 136 - DNA, 841 bp, Sorghum bicolor
atggaagacggcgacgagagcgccgcgtcggcggcggaggcggcgctggggctgaatccgcagcttttcgtcgacgaggtccacggcatcattgacgacatcagagccggggccttcgagtactgcctccaggcagcggccgcaccaggggtcctcggcgccgccagggctgcagagaaggccactgatctccagcggggattaaatgctattcaccatgtcgtaaaggatcgactggataagagaatggccaactgggagaaattctgcttactgcattgcttcaatgtacccgaaggttttgtggctgctgaagatgatatttcttgtgcaaaagaatcacacaaagatgacacttcagatttggatttggaaattgactccttgaggagaaagcttgaaagtgctaacatggagtctcaaaatcttgaaagagagatgtcgtcattggaaaggcaaactacatacagaacaaaacttgattcttctgtctctgagatacaaaagttgcttgaagactctgtgcaggaaaattttgaaggtcttgtgaaggcaataccggtattgcagcagaaagtaatagatatgagcaagaaaaggatggcgaccacatgtttggtagatcaacaggtttggaacatgaacaatttgacagacaacaagcgacaaacactggataagagttttactgcacgtgctgaagacattcaagatgtcatcagtaccttacagaacaagagtcttgtggggccgccattactcctacagggagcgcaggatcagggccgcagacacctagatggcgccagcaacagcaacattccagggaacagcaagaagg

SEQ ID NO: 137 - protein, 291 aa, Sorghum bicolor
MEDGDESAASAAEAALGLNPQLFVDEVHGIIDDIRAGAFEYCLQAAAAPGVLGAARAAEKATDLQRGLNAIHHVVKDRLDKRMANWEKFCLLHCFNVPEGFVAAEDDISCAKESHKDDTSDLDLEIDSLRRKLESANMESQNLEREMSSLERQTTYRTKLDSSVSEIQKLLEDSVQENFEGLVKAIPVLQQKVIDMSKKRMATTCLVDQQVWNMNNLTDNKRQTLDKSFTARAEDIQDVISTLQNKSLVGPPLLLQGAQDQGRRHLDGASNSNIPGNSKKARVKRIKDGKK

SEQ ID NO: 138 - DNA, 735 bp, Vitis vinifera
atggaaggcagcgaaagcgaagccatttttgaatctctaaacctcaatccccagctcttcatcaatgaagtccttaacctagtcgatgatttgcttgatggagcttttgatttctatcaacaggaagcatcgaatcttttgagaacggacggaaccgatcgctctggtgatataaacaagggtattggttatattcgtaatatgattcaaggagttttggataagcggctggagatgtgggagaagtattgcctaagacactgttttgctgttcctgagggattcttgatgcctaaagctagtgaaacacctggtgacagttcaattaacaaagatgtgctgtctggtctcgagctggatgcgcagttggattcattgagggataaacttacagtggttgcaaaggaatctgctgagctgaacagagagctccaagcattggaaaggcagtctgtcttaagcaatcaatgtactgggtctgttaatgaggcattgcagttatatgaacaaaacaaagtgcatgacatgtttcaggagatgatgagaactgcatcagaacttcgtactaaaatggagaagatgaagaccaagaggatggaagggattgaacgtgttaaaacagagaggatatacaacccagacagagatttgtctatgaggaatcgtgacaaaggcctattcaatgcagagttggaagatcttcaagaatttttagccaacataaagaacatgtga

SEQ ID NO: 139 - protein, 244 aa, Vitis vinifera
MEGSESEAIFESLNLNPQLFINEVLNLVDDLLDGAFDFYQQEASNLLRTDGTDRSGDINKGIGYIRNMIQGVLDKRLEMWEKYCLRHCFAVPEGFLMPKASETPGDSSINKDVLSGLELDAQLDSLRDKLTVVAKESAELNRELQALERQSVLSNQCTGSVNEALQLYEQNKVHDMFQEMMRTASELRTKMEKMKTKRMEGIERVKTERIYNPDRDLSMRNRDKGLFNAELEDLQEFLANIKNM

SEQ ID NO: 140 - DNA, 1279 bp, Zea mays
agcagtttctcaaacactggccgagcgcaaaatttgaaaaccaaccctcaacctcaatcggggtgccggcgtccgacgaagtcgacgggccatccccattccccacccggcagtcggcagtccccacaccccaagacctctgaagagtcggaagaagaagcgggcgatggaagacggcgacgagagcgcggccgcggcggcggcgctggggctgagcccgcagcttttcgtcaacgaggtccacggcatcatagccgacatcagcgccgaggccttcgagtactgtctccaggcagcagccgcgccaggtgtcgtcggcgccgccacggctgcagagaaggccacggatctccagcggggattaaatgctattcaccatgttgtaaaggatcgactggataagagaatgaccaactgggagaaattctgctatcgacattgcttcgatgtacctgaaggttttgtggccgctgatgatgatagttcttgtgcaaatgaatcacaaaaagatgggatttcggattcagatttggatttggaacttgactctttgaggagaaagtttggaagtgctaacaaggaatctgaaaaccttgaaagagagttgtcctcactggaaaggcaagctacgttcaaaagaagacttgattcttctgtctctgagatagaaaagttgtttgaagaagaaatggtgcagggaaatttgaaagatcttgtgaaggcaataccggttttgcaccagaaaataatagatgcaaatcagagaaggactgagattaggagcttggtagatcaacaggcttggaacacgaagagatcgagagacagcaagccataagcgctggagaagagtactgccagttcccactttccctcttcagttctcccgtgtataattaattaattatgttctctcgtgtatagttatgccatgtatttatatgccagtaaggcggtaaccaataacttatgtagcaggttctactgcatgtgttgaagacattcaagaggttgtcaacatcttacagagcaagtagcttgttgctcttttcctgattcatgttggttccacatagcgcctgcagcttgcttgcttggataaagcagtggtttgcccagttagtcttgttattgatcaaccgctattatttgatactggctccgtcccaaaatattagtcgttttagtattttaccagattcatatcatactcagtgtatgtcttttacatatgtctagattcattgttatttatttaaatatagacataaaattggtg

SEQ ID NO: 141 - protein, 223 aa, Zea mays
MEDGDESAAAAAALGLSPQLFVNEVHGIIADISAEAFEYCLQAAAAPGVVGAATAAEKATDLQRGLNAIHHVVKDRLDKRMTNWEKFCYRHCFDVPEGFVAADDDSSCANESQKDGISDSDLDLELDSLRRKFGSANKESENLERELSSLERQATFKRRLDSSVSEIEKLFEEEMVQGNLKDLVKAIPVLHQKIIDANQRRTEIRSLVDQQAWNTKRSRDSKP

SEQ ID NO: 142 - DNA, 1446 bp, Zea mays
gatcataatgaacatctttacaacatatggatgatgatgtaatgtcagaatcaagttgtcttagtttctttttgtttaatgagaaattggaaggatagcgacgattccaaagtccgaacagagctagtttctcccgagcgcaaattttgaaaaccctcaacccggcactccgcactcagatctgcctgccaggcccccccacaaatccacaatccaaccgcacaagactcggaagaagaagcggggtgatggaagacggcgacgagagcgcggcggcggcgctggggctgagcccgcagcttttcgtcaacgaggtccacggcatcatcgccgacatcagcgccgaggccttcgagtactgtctccaggcagcggccgcaccaggggtcgtcggcgccgccaaggctgcagagaaggccatggatctccagcggggattaaatgctgttcaccatgtcgtaaaggatcgactggacaagagaatggccaactgggagaaattctgccttcgacattgcttcgatgtacctgaaggttttgtggccgatgaaaatgatagttcttgtgcaaaagaatcacacaaaaatgggacttcagattcagatttggatttggaacttgactccttaaggagaaagctcgaaagtgctaacaaggagtctgaaaatcttgaaagagagatgtcgtcattggaaaggcaaagtatgcacaaaagaaaacttgattcttcaatctctgagatacaaaagttgtttgaagacaagttaatgcagggatttgaagaccttgtgaaggcaataccggcattgcggcagaaaataatagatatgaacaagaaaaggactgagatcaggtgtttggtagatcaacaggtttggaacacgagcagtgtgagaggcaacaagcgacaaacactggataagggttttactgcatgtggtgtagacactcgagaggtcgtcagtatctttgagaacatgtagcttgttgttctttacctgattcatgttgcttacccatagtgcccgcagcttgcttgcttggagcttttccccagtcttgttattgattgacaccagatattatttgggctaattcaattcaagaatgactggagatattattggccatctggcacaggtaaatgctacatgtaattgcttccagaagcatactagattggaaatgtaatccttcctgcggctacttgtctacctctggtcgagagattttctgaactgcttcggtcatcatagttcttttagcatacagtatgtggtataacttgtcctgtacatgagaaaggaacattaagcagctgctacatatatctgagaagtttcccattttatgttacaactagtatggtgcacatgtgttgcaacgaaacacaaactatttgttaaatgcttatgacctaagcatgtctatgtttttgaagcggca

SEQ ID NO: 143 - protein, 244 aa, Zea mays
MEDGDESAAAALGLSPQLFVNEVHGIIADISAEAFEYCLQAAAAPGVVGAAKAAEKAMDLQRGLNAVHHVVKDRLDKRMANWEKFCLRHCFDVPEGFVADENDSSCAKESHKNGTSDSDLDLELDSLRRKLESANKESENLEREMSSLERQSMHKRKLDSSISEIQKLFEDKLMQGFEDLVKAIPALRQKIIDMNKKRTEIRCLVDQQVWNTSSVRGNKRQTLDKGFTACGVDTREVVSIFENM

SEQ ID NO: 144 - DNA, 1279 bp, Brassica napus
  misc_feature (1246)..(1246): n is a, c, g, or t
ccgggcgaggattcggacgaggcaacctgcggaccgaagcataaaaaaaaaaaaaaaaaagaaagaagaaaaatgatgtcagcgaacgactacccgaagttctctcgctccgatatcatcaccgtcctcagggaggctaacatcgcttccgtcaaagacgccgatctcaaaaaccctaccttcgattccgtctccgacctttacaccaggatcctcatctatctcgacgtcctcaccgaagaagagagaggccaggttgatttcgaggctctggagcaactggagaatccagatcaccacaccacgtcagctccggctatggatctttacgtcaaactcaaacacacgctagagatggtggattgtccactaaacatcaatttcaaggatctgctacgcccagactcatcccgaaccgagtttttcatcagtgctcttttgaactatgctctacacaaggattcgaaaatggagcttataagaccacttgcagaagagttgactcttcttgatgagcaacggaggcagtctgaggccaagattgctcagttgaaagcagagattgctgagtttgaggaagccgaggaaagggattcgccttttgttcaagagctggaagtgggcatcgaagaactcagtcacaaaatagcacaactcaataatgagcagctttcactacgagctacgtttcacaagctgagagaggagtctgcagagatggataacaagatttcgaaagcagagtttgaccttgtgcaagctgtccaagaaaacgcaaacttacgctcactaattgttcagtccccagacaaattgcagggtgctttagaagagaagaaacttgttctcgaggaaactaagaaagctgaaagattagcaatggaaactttcgaggagaaggctgctattcttgaggtttatgaaaaggcattcaagaaaatgtcaaagtcatctgcgcaactgcaattaattaacgaacaggtaaccaatgtcaaagcaattgagaaagacctaaaagctcagaaagctaagctgaatgaggatgaggcattgtacaaatctcttgaggcgaaagtggttgagcgagaaagaacagtgaaacagttgcacgaatcactaaagcagctagagaaggagaaacaagtcatgtttgatgattggacgaaacaactgaatgagttaaaactagaagttgaatccagaagacgtctgcttgaatccaggcaaaatgatgttgaatcagtantagctatggttgatgagaatactgccaaggcta

SEQ ID NO: 145 - protein, 402 aa, Brassica napus
  misc_feature (392)..(392): Xaa can be any naturally occurring amino acid
MMSANDYPKFSRSDIITVLREANIASVKDADLKNPTFDSVSDLYTRILIYLDVLTEEERGQVDFEALEQLENPDHHTTSAPAMDLYVKLKHTLEMVDCPLNINFKDLLRPDSSRTEFFISALLNYALHKDSKMELIRPLAEELTLLDEQRRQSEAKIAQLKAEIAEFEEAEERDSPFVQELEVGIEELSHKIAQLNNEQLSLRATFHKLREESAEMDNKISKAEFDLVQAVQENANLRSLIVQSPDKLQGALEEKKLVLEETKKAERLAMETFEEKAAILEVYEKAFKKMSKSSAQLQLINEQVTNVKAIEKDLKAQKAKLNEDEALYKSLEAKVVERERTVKQLHESLKQLEKEKQVMFDDWTKQLNELKLEVESRRRLLESRQNDVESVXAMVDENTAKA

SEQ ID NO: 146 - DNA, 1083 bp, Brassica napus
  misc_feature (33)..(33): n is a, c, g, or t
tggaagtggccatcgaagaactcagtcacaaantagcacaactcaataatgrgcagctttcactacgagctacgtttcacaagctgagagaggagtctgcagagatggataacaaggttaagctattcatcatgtgcttgtgttatcagtctgagaggcgtttttctagctattaacatgtgtattacagatttcgaaagcagagtttgaccttgtgcaagctgtccaagaaaacgcaaacttacgctcactaattgttcagtccccagacaaattgcagggtgctttagaagagaagaaacttgttctcgaggaaactaagaaagctgaaagattagcaatggaaactttcgaggagaaggctgctattcttgaggtttatgaaaaggcattcaagaaaatgtcaaagtcatctgcgcaactgcaattaattaacgaacaggtaaccaatgtcaaagcaattgagaaagacctaaaagctcagaaagctaagctgaatgaggatgaggcattgtacaaatctcttgaggcgaaagtggttgagcgagaaagaacagtgaaacagttgcacgaatcactaaagcagctagagaaggagaaacaagtcatgtttgatgattggacgaaacaactgaatgagttaaaactagaagttgaatccagaagacgtctgcttgaatccaggcaaaatgatgttgaatcagtagtagctatggttgatgagaatactgccaaggctaaccaggtgaaacagtcaggacaagctaaagtgaaacagttagcagataaatatgaggagatcgtgaagcagtttcatgagtacacggtgaagtttggagcggttctgccaagcttataagaggggaagaaaggtttgactgagtcgagtgatggtagaaagagattttaatttcaaactaaattattgtgattgtatcaagcttcgaaaatgttaatttagttatgcttgttttttgagttttcggcatttgcacgctggagaaactcatcacggtctctcacaattattttggactagtggtctgcgggatgtcgtcttttgtaactatgcgttgttggatc

SEQ ID NO: 147 - DNA, 1290 bp, Brassica rapa
atgatgtcagcgaacgactacccgaagttctctcgttccgatatcatcaccgtcctcagggaggctaacatcgcttccgtcaaagacgccgatctcaaaaatcctaccttcgattccgtctccgacctttacaccaggatcctcatctatctcgacgtcctcaccgaagaagagagaggccaggttgatttcgaggctctggagcaactggagaatccagatcaccacaccacttcagctccggctatggatctttacgtcaaactcaaacacacgctagagatggttgattgtccatttaacatcaatttcaaggatctgctacgcccagactcatcccgaaccgagtttttcatcagtgctcttttgaactattctcttcacaaggattcgaaaatggagcttataagaccacttgcagaagagttgactcttcttgatgagcaacggaggcagtccgaggccaaggttgctcagttgaaagcagagattgctgagtttgaggaagccgaggaaaaggattcgccttttgttcaagagctagaagtgagtatagaagaactcagtcacaaaatagcacaactcaataatgagcagctgtcactacgagctacgtttcacaaactgagagaggagtctgcagagatggataataagatttcgaaagcagagtttgaccttgtgcaagctgtccaagaaaacgcaaacttgcgctcactgattgttcagtccccagacaaattgcagggtgttttagaagagaagaaactagttctcgaggaaacaaagaaagctgaaagattagcgatggaaactttcgaggagaaggctgctattcttgaggtttatgaaaaggcattcaagaaaatctcaaagtcatctgcgcaactgcaattaattaacgaacaggtaaccaatgtcaaagcaattgagaaagacctaaaagctcagaaaactaagctgaatgaggatgagacattgtacaaatctcttgaggcgaaagtggttgagcgggaaagaacaggcaagccttggtctatatatctgccctctttagagataatgtttctcaattttgttgttcgcggagagactgtaatgttacattctttcaacagtgaaacagttgcacgaatcactaaagcagttgatgagaatactgccaaggctaaccaggtgaaacagtcaggacaagctaaagtgaaacagttagcagataaatatgaggagatcgtgaagcagtttcatgagtacacggtgaagtttggagcggttctgccaagcttataa

SEQ ID NO: 148 - protein, 429 aa, Brassica rapa
MMSANDYPKFSRSDIITVLREANIASVKDADLKNPTFDSVSDLYTRILIYLDVLTEEERGQVDFEALEQLENPDHHTTSAPAMDLYVKLKHTLEMVDCPFNINFKDLLRPDSSRTEFFISALLNYSLHKDSKMELIRPLAEELTLLDEQRRQSEAKVAQLKAEIAEFEEAEEKDSPFVQELEVSIEELSHKIAQLNNEQLSLRATFHKLREESAEMDNKISKAEFDLVQAVQENANLRSLIVQSPDKLQGVLEEKKLVLEETKKAERLAMETFEEKAAILEVYEKAFKKISKSSAQLQLINEQVTNVKAIEKDLKAQKTKLNEDETLYKSLEAKVVERERTGKPWSIYLPSLEIMFLNFVVRGETVMLHSFNSETVARITKAVDENTAKANQVKQSGQAKVKQLADKYEEIVKQFHEYTVKFGAVLPSL

SEQ ID NO: 149 - DNA, 1386 bp, Glycine max
atggcggagtcgaattacgagtacccaaggctacggcggccggaaatagtcacaatcctagcgcagttgcagatcgcgaacgtgaccgagcaggacttcaccaaccctaaccctgatttcatctccgatctctacactcgcgtcctcattcatctcgacattctcctcgaggaagacaacgagcaactcgagttccacgccctagagcatcttgaaaaccctgatttccacctggattccgttcgcgccgtgaaactctacaaccagatcaacgaggttctcacgacactcgagtgtccgcgcaaattcaccctcgccgatcttctcatgccggatcctcaccgaaccgacctcttccttggctctcttctcaatttttgtctcgatagggacgcgagaatgaactccgtctcggaaattgtggaggaagtgaacgctctagaggcgcagcgaacggagttggaggagaataggattttgcagttgaaagcggaaatttcggaatgcaatgaggcgaaggagagggagatgcctcttgttgaggaggtggaggccaaagttaaagagctcaagcaaacgattgcggtgctgaacagcaaccagagttctctgagaagtactttgaggaagttgaaggagaagaccggggaaacggatgagaagatttcaaatgctgaatttacattggtacaaaatgtccaagaaaatgcaaatctacgttcaaaaatcagtcaatcacctgataaagtacagagggctttagaggaaaagaaattagctcgtgaggaggcaaggaatgctgaaagattagcaatgcaagcttttcatgagaagactgcccttgttgaagttttttccaaggtgtacaagaaaatgtcaaaacacaacaagctgatgcaggatatacaagaacaggtaaattctgctaaatctattgaaaaggatcttaaagcattgaaggctaaacttagtgatgaagaaatattggagaagtcacttgaggccaaattggttgaaaaacagagtaaagttgagcagatggaagaatcgaggaagcaattggagaaagagtccaatattatgtgggaagaagcaactaaatacttaagtagtacgaaatcagatgttgaatctaagagatctgctacagaaacaaggcagaaaaatgttgaggctgttttatctgaggtggatgccataagtagtaaaattatatcagtaaaagaagctggagcagttaaagtggcactgttagtgcgcaaatgtgaagagctagtagaagcgtttcacaactatgcgaatccgattgcacgcgtgattgaatctgagcaaagaagactcggggccactaaaggaggtggatttggcatttcagatccggtttaa

SEQ ID NO: 150 - protein, 461 aa, Glycine max
MAESNYEYPRLRRPEIVTILAQLQIANVTEQDFTNPNPDFISDLYTRVLIHLDILLEEDNEQLEFHALEHLENPDFHLDSVRAVKLYNQINEVLTTLECPRKFTLADLLMPDPHRTDLFLGSLLNFCLDRDARMNSVSEIVEEVNALEAQRTELEENRILQLKAEISECNEAKEREMPLVEEVEAKVKELKQTIAVLNSNQSSLRSTLRKLKEKTGETDEKISNAEFTLVQNVQENANLRSKISQSPDKVQRALEEKKLAREEARNAERLAMQAFHEKTALVEVFSKVYKKMSKHNKLMQDIQEQVNSAKSIEKDLKALKAKLSDEEILEKSLEAKLVEKQSKVEQMEESRKQLEKESNIMWEEATKYLSSTKSDVESKRSATETRQKNVEAVLSEVDAISSKIISVKEAGAVKVALLVRKCEELVEAFHNYANPIARVIESEQRRLGATKGGGFGISDPV

SEQ ID NO: 151 - DNA, 1041 bp, Medicago truncatula
atgtcgaactacgaatacccacgtcttggtcgatcagaaataatcctaaccctctcccaattcgaaatcgaaaccgtcgccgatcaccaaatctccaaccctagacccaacttcattctacatctctacaaccgcatcctcaaccaccttgattttctacttgatgaagacaatcatcaacttgatttcaatgcagttgagcatctcgaaaatcctgatcttcacgttggatcggttcctgttatcaaggtgtataataagatcaaggaaatgcttaatactcttgaatgtcctaagaaatacacgtttaacttggctgatcttgttaagcctgatcctcatcgtaccgagttctttctcggtgctcttctcaatttctgtctggacagagctgggagaatgaattccatagaaaaatatgtagatgaattcaacgccttggaacagaagatagtggagattaaggagaataagattacgcagttgaaactggcgattgctgaatcctttgaagcgagagaaagggagatgccatttgttcaggaggtggatgcaaaagttaaagagctgcgtcaaactattccaaacctgaacaacaaacagatgtcgttgacgactaatttaaagaagttgaaggaggagaatgtggaaatggatgaaaagatttctgatgctgaatatagactgatccaaaatgttcaagagaatgcaaatttacgttcgaaaattgctcaatcacctgataaaatgttcgtgctgtggctttccttgtcttgcataaagagggctttagaggaaaagaaattagctcgagacgtggcaagaaattctgaaagattagccatgcacaatttccacgagaagactgccctcgttgaagtattttccaaggtatacaaaaaaatgtcaaagcacaacaaacaagtgcaggctatgcaagaacaggccaattctgctaaatcaattgaaaaggatcacagagcattaaaagctaaggttggtgatgaagacgtaccggagaagtcacttgaggccaaatag

SEQ ID NO: 152 - protein, 346 aa, Medicago truncatula
MSNYEYPRLGRSEIILTLSQFEIETVADHQISNPRPNFILHLYNRILNHLDFLLDEDNHQLDFNAVEHLENPDLHVGSVPVIKVYNKIKEMLNTLECPKKYTFNLADLVKPDPHRTEFFLGALLNFCLDRAGRMNSIEKYVDEFNALEQKIVEIKENKITQLKLAIAESFEAREREMPFVQEVDAKVKELRQTIPNLNNKQMSLTTNLKKLKEENVEMDEKISDAEYRLIQNVQENANLRSKIAQSPDKMFVLWLSLSCIKRALEEKKLARDVARNSERLAMHNFHEKTALVEVFSKVYKKMSKHNKQVQAMQEQANSAKSIEKDHRALKAKVGDEDVPEKSLEAK

SEQ ID NO: 153 - DNA, 828 bp, Medicago truncatula
atggcgatgtcgaactacgaatacccaaggcttcgccggccagaaatagttcaactcctaaacaactttcaaattgctaccgttacagagaacgacatctccaaccccagaaccggcgtcgttttggatctctacactcgcatcctcaactacctcgattttctccacgacgaagacaacggacagcttgatttcgatgcactagagcatctcgagaatcccgaccttcacgttggatctattcatgctatcaagctttacaacaagatcaaggaaatgcttaacttacttgaatgtcctaagaaatacacatttaactttgccgatcttctcaaacccgatcctcatcgaaccgagtttttccttggagctcttctcaatttctgtctcgacagggatgggagattgaatgcgatatcagaaatcgtagacgaattcaacgcgttggaacagaagatagttgagattgaagagaataatattacacagttgaaattggcgattgctgaatgcaatgaagcgagggaaagggaattgccttctgttcaggaggtggatgcaaaagttaaagagttgcgtcaaactattgcgaacctgaacaataaacagatgtcattgagaagtacaataaagaagttgaaggagaagactgtggaaatggatgataagatttctgatgctgaatataaactggtacaaaatgttcaagagcatggaaatctactttcaaaaattgctcaatcgcctgataaagtacaggactgcccttacctctgtgtggttaccacagtggaaaactctcgcgactcacaaccttctcttgggtag

SEQ ID NO: 154 - protein, 275 aa, Medicago truncatula
MAMSNYEYPRLRRPEIVQLLNNFQIATVTENDISNPRTGVVLDLYTRILNYLDFLHDEDNGQLDFDALEHLENPDLHVGSIHAIKLYNKIKEMLNLLECPKKYTFNFADLLKPDPHRTEFFLGALLNFCLDRDGRLNAISEIVDEFNALEQKIVEIEENNITQLKLAIAECNEARERELPSVQEVDAKVKELRQTIANLNNKQMSLRSTIKKLKEKTVEMDDKISDAEYKLVQNVQEHGNLLSKIAQSPDKVQDCPYLCVVTTVENSRDSQPSLG

SEQ ID NO: 155 - DNA, 1813 bp, Oryza sativa
gcatttcatttttttttttgccttcgaaattcctcgcatttggtttcccttgttgatttgggggaacggcggcggcggcgagagagcggctgcggcggcgacggcggcggcgaagaagaagatggcgtccaacttctcgttccctccgctggcgccggagcagatagcggaggcgctgcacacctacggcctcgcccccaccgccaacctccgcgcggaggacatcgccaacccgcagccggatctcctccccgccgtcatctccaacttccttgccaccgtcgtcgaccccaccggcgccgacgacctcgacgggcagctagggttcgacgcgctggcgtcgctcgacaacccggagcactatagggagggcatccgggtcctccgcctccacaagagggccaacgctttcctcgagtccatccagttccccgggttcacgctccgcgacctcctccgcccagacccgcgccgcctcgtgcaagtcctcagcgccctcatcaacttcctctactacagggacgagaagctcgccctcctgcagcccatcatccatgagttccccaacttggatgaacggtgcatggagctcaatgccaagattgccgagcatcagaaggcaatcgccgatcaagagctcgccgcgcaaatggaggtgcctatggttcagcagctagaggcggaggtcaattccctgaagcaaaaacttgtagagtacaacaaaaagcagctggcactgagggccaacgccactgcgatcaatgacaagaaagaggagacccacagaaagattgccaaaagcgattttgagttggtgaaactagcccaagaaaattccaagttattgtcaaaaattgttcagtccccagaaaagcttcagagggcccttgaagagaagaaaacagctcgtgctgagttgaagaatgctgagaagatagcaatgcaaagtgtacaagagaaaactgccactttggagatatacagtaagggttatgaaaaattgtcgaagcattcttctaaaatccaggctttacaagaacagtttactgcaactaaagcccttgagaaagaagtcaaagcgcgcaaagctaagattagtgatgaaagtgttgaaattatggcccttgacacaaagactattgaatgggatgggaaagtgcatgaaatggaggagcgtgttaaagctaaagaaaaagaaagggatcaaatagtagcagacgaaaatcagaagctggctgctttgaggtctgaagttgaatggaaactcaagtgtcttgaacctcgtgaaaggaaagtagaggaaacaattgcaaaggctactaaactatgtgcggaggttgattcaacaaggactgatgctgcagaagaactgcggctgatatatgctaaatttcaacaaattggacatgcctttacttgctacaaggacaattttaagactttcttggaacaagttgatgaggtgagcaaagaaactttagaaagtttaggtcgccaagctgtggagccattggacacatctgcaacattgtcgattgagaaagagaactcctgcggccccgctccctgaaaagaggatagccaattggagaagatagctagggtgttttgcgccactgttgtaaatttggaattgagctgtttttgttatcactggtgacagttatgctctgtttgaacctcatctgaccaattcggtgagaatacttcatcatcgaatcatctgcagtcgttatgtaaaaaaatcttgagtcactctgatatggaaatgttggtgtcaggttgccaagtaaaaactttggattatctgtcc

SEQ ID NO: 156 - protein, 482 aa, Oryza sativa
MASNFSFPPLAPEQIAEALHTYGLAPTANLRAEDIANPQPDLLPAVISNFLATVVDPTGADDLDGQLGFDALASLDNPEHYREGIRVLRLHKRANAFLESIQFPGFTLRDLLRPDPRRLVQVLSALINFLYYRDEKLALLQPIIHEFPNLDERCMELNAKIAEHQKAIADQELAAQMEVPMVQQLEAEVNSLKQKLVEYNKKQLALRANATAINDKKEETHRKIAKSDFELVKLAQENSKLLSKIVQSPEKLQRALEEKKTARAELKNAEKIAMQSVQEKTATLEIYSKGYEKLSKHSSKIQALQEQFTATKALEKEVKARKAKISDESVEIMALDTKTIEWDGKVHEMEERVKAKEKERDQIVADENQKLAALRSEVEWKLKCLEPRERKVEETIAKATKLCAEVDSTRTDAAEELRLIYAKFQQIGHAFTCYKDNFKTFLEQVDEVSKETLESLGRQAVEPLDTSATLSIEKENSCGPAP

SEQ ID NO: 157 - DNA, 1750 bp, Oryza sativa
ccttcgaaattcctctcatttgggggaaaggcgtcggcggcgagagagcggcggcggcgaagaagaagatggcgtccaacttctccttccctccgttgacgccggagcagatcgcggaggcgctgcacacctacggcctcgcccccaccgccaacctccgcgcggaggacatcgccaacccgcagccggatctcctccccgccgtcatctccaacttcctcgccaccgtcgtcgaccccaccggcgccgacgacctcgacgggcagctaggattcgacgcgctggcgtcgctcgacaacccggagcactacatggagggcatccgggtactccgcctccacaagagggccagcgctttcctcgagtccatccagttccccgggttcacgctccgcgacctcctccgccccgacccgcgccgcctcgtgcaagtcctcagcgccctcatcaacttcctctactacagggacgacaagctcgccctcctgcagcccatcatccacgagttccccaacttggatgaacggtgcatggagctcaaggccaagcttgccgagcatcagaaggcaattgccgatcatgagctcgcggcgcaaatggaggagccgatggttcagcagatagaggcggaggtcaattccctgaagcaaaagcttgtagagtacaacaaaaagcagctggcactgagagccaacgcgactgcgatcaatgacaagaaagaggagacccacagaaagattgccaaaaatgattttgagttggtgaaactagcacaagaaaattccaagttattgccaaaaattgttgagtccccagaaaagcttcagagggcccttgaagagaagaaaacagctcgtgctgaattaaagaatgctgagaagatagcaacgcaaagtgtacaagagaaaactgccactttggagatatacagtaagggttatgaaaaattgtcgaagcattctactaaaatccaggctttacaagaacaggttactgcaactaaagcccttgagaaagaagtcaaagcgcgcaaaactaagattagtgatgaaagtgttgaaattatggcccttgacacaaagattattgaatgggatgggaaagtgcatgaaatggaggagcatgttaaagctaaagaaaaaaaaaaggatcaaatagtagcagacgaaaatcagaagctggctgctttgagttctgaagttgaatggaaactcaagtgtcttgaacctcgtgaaaggaaagtagaggaaacaattgcaaaggctactaaactatgtgcggaagttgattcaacaaggactgatgctgcagaagaactacagctgatatatgctaaatttcaacaaattggacatgcgtttacttgctacaaggataattttaagtctttcttggaacaagttgatgaggtgagcaaagaaactttagaaagtttagatcgtcaagctgtggagccattggacacatctgcaacattgtagattgagaaagagaactcctgcagccccgctccctgaaaagaggatagccacttggagaagatagcctagtgtgttttatgccacagctgtaaatttggaattgagatgtttttgttatcactggtgacagttatggaccttatggtctgtttgaacctcgtctgaccaattcggtgactgagaatacttcatcgaattatctgcagtagttatgtaaaaatgccttgaatcactctgatatggaaatgttggtgtcaggttgccaagta

SEQ ID NO: 158 - protein, 470 aa, Oryza sativa
MASNFSFPPLTPEQIAEALHTYGLAPTANLRAEDIANPQPDLLPAVISNFLATVVDPTGADDLDGQLGFDALASLDNPEHYMEGIRVLRLHKRASAFLESIQFPGFTLRDLLRPDPRRLVQVLSALINFLYYRDDKLALLQPIIHEFPNLDERCMELKAKLAEHQKAIADHELAAQMEEPMVQQIEAEVNSLKQKLVEYNKKQLALRANATAINDKKEETHRKIAKNDFELVKLAQENSKLLPKIVESPEKLQRALEEKKTARAELKNAEKIATQSVQEKTATLEIYSKGYEKLSKHSTKIQALQEQVTATKALEKEVKARKTKISDESVEIMALDTKIIEWDGKVHEMEEHVKAKEKKKDQIVADENQKLAALSSEVEWKLKCLEPRERKVEETIAKATKLCAEVDSTRTDAAEELQLIYAKFQQIGHAFTCYKDNFKSFLEQVDEVSKETLESLDRQAVEPLDTSATL

SEQ ID NO: 159 - DNA, 1137 bp, Setaria italica
atgccgcctgcgccgaccgatgggataggcctcgttgtccggatgctccggccatccatggcgtcccatgagactatggcgggagagagagagcgagcgaaatccgaacgccgccgcccgacccgtccgtccatccggtggtccgattcgccggcgccagccagccgcccgcggcggggcccgatggcgaccaacttctccttcccggagatgacgccggcgcagatcgcggagggtctgcactcctacgacatcgcgcccaaccccaacctccgcgccgaggacatcgccaaaccgcagccggagctcctccccaacgtcttctccctcttcttcaccaacgtcgtcggcgacaacccccccgacgagcagctaggattcgatgagctgctggtgctcgaaaacccggagcaccacttgcaagccatggcgctcaggcgcatctaccggaaggcccgggacttcctcgactccatctacttcgggggcctcacgctccgcgacttcctccgcccccacccacgccgcatcatcgacatcctcagcgccttagtcaactacctgcacttcaggcaggagaagctcgacgtcctcaaacccatctcgcaagagtacttcgagcgtgaggaccagctcacggagctcagggctagggtcgccgagcttcagaaggcgaaaacggagcatgcctacaacgagcagatggaggagcccgtggtccagcagctccaggcggaggtcaacaccctcaggcagaagattcaagagtacaacacgcatcagttggcgctgagaatacatgaaactgaggtccgtctcaaggcaaaggagaaagaaagggaccaaagaatcgaagagaataaacagaagatgactaccttgaaatctgaagttgaatcagaacttaagtgccttgcagacagagaaagggaaatagaggagaagattgcaaaggctgcggatttatgctcccaatccgattcggtagaggttgctggcagaaaaaaacgagaggaaatctatgccacgtttgagcaagtttgtgagacggctaacatgtacatggatggcatcgatcgttcccgcaaagaagttgacgaagcgagtatggccattataagccagattggcccatga

SEQ ID NO: 160 - protein, 378 aa, Setaria italica
MPPAPTDGIGLVVRMLRPSMASHETMAGERERAKSERRRPTRPSIRWSDSPAPASRPRRGPMATNFSFPEMTPAQIAEGLHSYDIAPNPNLRAEDIAKPQPELLPNVFSLFFTNVVGDNPPDEQLGFDELLVLENPEHHLQAMALRRIYRKARDFLDSIYFGGLTLRDFLRPHPRRIIDILSALVNYLHFRQEKLDVLKPISQEYFEREDQLTELRARVAELQKAKTEHAYNEQMEEPVVQQLQAEVNTLRQKIQEYNTHQLALRIHETEVRLKAKEKERDQRIEENKQKMTTLKSEVESELKCLADREREIEEKIAKAADLCSQSDSVEVAGRKKREEIYATFEQVCETANMYMDGIDRSRKEVDEASMAIISQIGP

SEQ ID NO: 161 - DNA, 1371 bp, Sorghum bicolor
atggcgagctcattctccttcccgctgtttacgccggcggatatcgtggcggcgctgcacagctacggcatcgcgcccagccctagcttctgcgccgaggacgtcgtccaccctcagcccggcctcctcgccgaggtcctccagctcttcctcctcaacttcgtcggcgacgagcccgacgagcagctacagttcaatgccctgcaggtgctcgacaacccggagcaccacatgcgcgccctacggttttcgcggatctacaagagggccaacgctttcctccagtccatccagttccgggacctcaatatccgcgacctcctccgcgccgacggcccccgtgtcgtccacatcctcagcgccctcatcaactttctcttcttcaggcaagagaagctcaccttgctagagcctatcgtcgaagagtacggcgcgattgagaaacggcagggggagctcagggctaagatcgccgagcttagcaaggcgaaagaggaccatctgcttaaggagcaggtggaggcacacatggtccagcagctcgagaatgaggtcaatgccctcaagcagaggcttcatgattataacagagagcagctgtcactgcgcaatgcatcaaaagccttggacgaaaagagagaggatacactgaggaagatcaaccaggctgattttgagttggtgaaagttatgcaagaaaagaaaaagctatcagccaaaattgttcattcccctgaaaagctccagaggaaccttgaggagaagaaatcagtccgtgatgagttaaagaacttagagaagatagcaatgcagaaagtccaagagaaaaccaatactcttgagatgtatactaaggtttctgagaaactagcgaagcatctctctaaaatatctgctgtacatgaaaagagcgctgctgctaaagcttttgagaaggatgttaaagcacacaaagagaagatcagtgatcaaaatctggagataaaggcacttcgcaataaagctgctgaatgggaaatgaaagtactcgagaacgaggccaaagtgaaagcaaaggagaaagaaagggatcaaagagttggagagcacaatcggaagatgactgcattgaaatctgaagttgaatcggagcagaagtgccttgaggagaaagaaagaaaaataaaggaaacaattgacaagggttctgaattatgctctcaagctgattcggttgctgaagctggaaggaagaaaatagaggaaatctatgggaagtatgatcaagtttgtgaggcggctaacatgtacattgatggttcggatcagtccttcgaagagactgatgaagctgcagcgatgctgaaaactatagcccagagtggcgcttga

SEQ ID NO: 162 - protein, 456 aa, Sorghum bicolor
MASSFSFPLFTPADIVAALHSYGIAPSPSFCAEDVVHPQPGLLAEVLQLFLLNFVGDEPDEQLQFNALQVLDNPEHHMRALRFSRIYKRANAFLQSIQFRDLNIRDLLRADGPRVVHILSALINFLFFRQEKLTLLEPIVEEYGAIEKRQGELRAKIAELSKAKEDHLLKEQVEAHMVQQLENEVNALKQRLHDYNREQLSLRNASKALDEKREDTLRKINQADFELVKVMQEKKKLSAKIVHSPEKLQRNLEEKKSVRDELKNLEKIAMQKVQEKTNTLEMYTKVSEKLAKHLSKISAVHEKSAAAKAFEKDVKAHKEKISDQNLEIKALRNKAAEWEMKVLENEAKVKAKEKERDQRVGEHNRKMTALKSEVESEQKCLEEKERKIKETIDKGSELCSQADSVAEAGRKKIEEIYGKYDQVCEAANMYIDGSDQSFEETDEAAAMLKTIAQSGA

SEQ ID NO: 163 - DNA, 843 bp, Sorghum bicolor
atggtccagcagctcgagaatgaggtcaatgccctcaagcagaggcttcatgattataacagagagcagctgtcactgcgcaatgcatcaaaagccttggacgaaaagagagaggatacactgaggaagatcaaccaggctgattttgagttggtgaaagttatgcaagaaaagaaaaagctatcagccaaaattgttcattcccctgaaaagctccagaggaaccttgaggagaagaaatcagtccgtgatgagttaaagaacttagagaagatagcaatgcagaaagtccaagagaaaaccaatactcttgagatgtatactaaggtttctgagaaactagcgaagcatctctctaaaatatctgctgtacatgaaaagagcgctgctgctaaagcttttgagaaggatgttaaagcacacaaagagaagatcagtgatcaaaatctggagataaaggcacttcgcaataaagctgctgaatgggaaatgaaagtactcgagaacgaggccaaagtgaaagcaaaggagaaagaaagggatcaaagagttggagagcacaatcggaagatgactgcattgaaatctgaagttgaatcggagcagaagtgccttgaggagaaagaaagaaaaataaaggaaacaattgacaagggttctgaattatgctctcaagctgattcggttgctgaagctggaaggaagaaaatagaggaaatctatgggaagtatgatcaagtttgtgaggcggctaacatgtacattgatggttcggatcagtccttcgaagagactgatgaagctgcagcgatgctgaaaactatagcccagagtggcgcttga

SEQ ID NO: 164 - protein, 280 aa, Sorghum bicolor
MVQQLENEVNALKQRLHDYNREQLSLRNASKALDEKREDTLRKINQADFELVKVMQEKKKLSAKIVHSPEKLQRNLEEKKSVRDELKNLEKIAMQKVQEKTNTLEMYTKVSEKLAKHLSKISAVHEKSAAAKAFEKDVKAHKEKISDQNLEIKALRNKAAEWEMKVLENEAKVKAKEKERDQRVGEHNRKMTALKSEVESEQKCLEEKERKIKETIDKGSELCSQADSVAEAGRKKIEEIYGKYDQVCEAANMYIDGSDQSFEETDEAAAMLKTIAQSGA

SEQ ID NO: 165 - DNA, 921 bp, Sorghum bicolor
atgtcgagctccttttccttcccgaagtataagccgacggagatcgtggacgcgctgcagatctacggcatcgcgccgaccgccaccttccaagccgatgatgtcgcaaaccctcggcccggcctcgtcgccgaagtcctcgaactctttatcgccaacttcctctgcgaagagcccgacgagcagctacagctccaggcgctgcaggtgctcgacatcccggagcaccaaatgcaccctctacagttctcgcggatctacaagagggccaacgccttcctccagtccatccagttccgggacctcaatctccgcgacctcctccgcgccgatggcccccgtgtcgtccacatcctcagcgccctcatcaatttcctccacttcaggcacgacaggatcagcgtcctcgccctcatcgtccaagagtacgaagcgcttgaggaacggcagaaggagctcagggctaagatcgccgagcttcagaagacgaacgaggagcatctgcttaaggagcagatggaggcgcccgtggtccagcagctcgagaaggaggtcaatgacctcaagcataggcttcatgattacaacagagagcagctgtcgatgcgcaatgcatccaaagccttggacgaaaagagagaggagatactcaggaagatcaagcaggctgattttgagttggtgaaagttatgcaagaaaaacaaaatctatctgccaaaattgttcattcccctgaaaagctccagaggaaccttgaggagaagaaaacagtccgtgatgagttgaagaacttagagaagatgacaatgcagaaagtccaagagaaaaccaatactcttgagatgtatactaaggtttctgagaaactaacaaacaatgattgtacaaatatattattcatgctagagtgctgctgctaa

SEQ ID NO: 166 - protein, 306 aa, Sorghum bicolor
MSSSFSFPKYKPTEIVDALQIYGIAPTATFQADDVANPRPGLVAEVLELFIANFLCEEPDEQLQLQALQVLDIPEHQMHPLQFSRIYKRANAFLQSIQFRDLNLRDLLRADGPRVVHILSALINFLHFRHDRISVLALIVQEYEALEERQKELRAKIAELQKTNEEHLLKEQMEAPVVQQLEKEVNDLKHRLHDYNREQLSMRNASKALDEKREEILRKIKQADFELVKVMQEKQNLSAKIVHSPEKLQRNLEEKKTVRDELKNLEKMTMQKVQEKTNTLEMYTKVSEKLTNNDCTNILFMLECCC

SEQ ID NO: 167 - DNA, 1362 bp, Vitis vinifera
atgtcgaaattcgaatacccaatgattccacgctcagaaattatagcaatccttaacgagtccaaaattgcaacggtctacgatgaggatctcatcaatcccaaccccgatttcgtctccgatctctacaccaggctcctcattcacctcgactctctccaggaagatcctgggcaagtcgaatttgccgccttggagcggctcgagaacccagattggcaccgtgattctgttcgtatcatgaatttgtacagcaagattaaggagcttgtggcttcgctggattgcccttggaagtttaccctcaaagatctcatacgccccgatagggacaggaccgagaagtttctcggcactatactgaatttctttcttcacaaagattcaaaaatgaatgaactaagaccaattgtagaggaatcaaatcttctagatgaagagcgaaagctgttggaagatagaatttcccagttggatgcagagattacagactacaatgaagcgagagaaagagcgatgcctcttgttcaagagatagaggtaaaggttaaagatttgcgtcaggccattccaagcctcaacaatcagcagatgtcattgagaacatctttccgaaaaatgaaggagaaggttgcagaaatggatgagaagatttctagtgcggagtttgcccttgtacaaagtgtccaagaaaatgccaatctacgttcgaaaattgtacaatcaccagataaactacagaggactttagaggagaaaaaatctgttcgagttgaggcaaagaatgcagaaagatcagcaatgcaatcttttcaggagaagtctgccattgttgaggtctacacaaaggctggcaagaaaatgtccaagcattttgcgcaaatgcaggctatacaagaacaggtgaactctgccaaagccatagaaaaagatctcaaggttctaaaaactaagctgagtgaagagggagtcttggataagtcttttgaggccaaacttcttgaacgacaaagaaaagtggaacagttagatgaactaagaaagcagttagaaaaagaacgaaattttaagtgtgaggaggctgctaaagaattaaataatgtcaagttggcagtggaatcaaaaaggcgtgagttagaagcaaggcagaggaaggttgaagctgaggcagcagaggttgatgctacaactttaaagattaattcagtaaaagaatctggagcagctaaacagcaaaagttgacccgcaagggtgaagagattgtgaaagagttccaccaatatgcaaactctattggggtcttgctgccaaggatccaagtggagccagaagttgatcaagatatgggcagatccaactaa

SEQ ID NO: 168 - protein, 453 aa, Vitis vinifera
MSKFEYPMIPRSEIIAILNESKIATVYDEDLINPNPDFVSDLYTRLLIHLDSLQEDPGQVEFAALERLENPDWHRDSVRIMNLYSKIKELVASLDCPWKFTLKDLIRPDRDRTEKFLGTILNFFLHKDSKMNELRPIVEESNLLDEERKLLEDRISQLDAEITDYNEARERAMPLVQEIEVKVKDLRQAIPSLNNQQMSLRTSFRKMKEKVAEMDEKISSAEFALVQSVQENANLRSKIVQSPDKLQRTLEEKKSVRVEAKNAERSAMQSFQEKSAIVEVYTKAGKKMSKHFAQMQAIQEQVNSAKAIEKDLKVLKTKLSEEGVLDKSFEAKLLERQRKVEQLDELRKQLEKERNFKCEEAAKELNNVKLAVESKRRELEARQRKVEAEAAEVDATTLKINSVKESGAAKQQKLTRKGEEIVKEFHQYANSIGVLLPRIQVEPEVDQDMGRSN

SEQ ID NO: 169 - DNA, 1287 bp, Vitis vinifera
atgtcgaaattcgaatacccaatgctcccacgctcagatatcatagcaatccttaacgaatccaaaatcgcaacagtctatgaggacaatctcatcaatcccaaccccgatttcgtctccgacctctacaccaggcttctcattcacctcgattctctccaggaagatcctgggcaaatcgaatttgccgcattggagcagcttgagaacccagattggcaccgtgattctgttcgtgtcatgaatttgtacagcaagattaaggagcttgtggcttctctggagtgccctaagaagtttaccctcaaagatcttatacgccccgatagggacaggaccgagcggtttctcggcaccatactgaatttctttcttcacaaagattcaaaaatgaatgacctaagaccaattgtagaggaattgactcttctagatgagcagcgtaaccagttcaaagatagaatttcccagttggatgcagagattgcagactgcagtgaagcaagagaaagagagaggccgcttgttgaagaggtagaggtaaaagttaaagaactgcgtcagaccattccaagcctcaacaatcagcagatgtcattgagggcatcttttcgaaaaatgaaggagaaggtcacagaaatggatgagaagatttctagcgctgagtttgcccttgtacaaagtgtccaagaaaatgccaatctacgttctaaaatcatccaatcaccagataaactacagagggctttagaggagaagaaatcagatcgaattgaggtgaagaatgctgaaaaatcagcaatgcaatcttttcaggagaagtctgctattcttgaggtttacacaaaggctggcaagaaaatgtccaagcattttgcccaaatgcagactatacaagaacaggtgaattctgccaaagccattgaaaaagatctcaaggttataaaaactaagctgagtgaagagggagtcttggaaaagtctcttgaggccaaacttgttgaatggcaaggaaaagtggaacagttggatgacctaagaaagcaattagaaaaagaacgagattttaagtgtgaggaggctgctaaagaattgaataatgtcaagttggcagtggaatcgagtaggcatgagttggaagcaaggcaaaagaaggttgaagcccaagcagcggaggttgatggtataactttaaagattaattcagtaaaagaatctggagcagctaaacagcaagagttgatcagcaagggtgaagagattatgaaagaggtacacttccattga

SEQ ID NO: 170 - protein, 428 aa, Vitis vinifera
MSKFEYPMLPRSDIIAILNESKIATVYEDNLINPNPDFVSDLYTRLLIHLDSLQEDPGQIEFAALEQLENPDWHRDSVRVMNLYSKIKELVASLECPKKFTLKDLIRPDRDRTERFLGTILNFFLHKDSKMNDLRPIVEELTLLDEQRNQFKDRISQLDAEIADCSEARERERPLVEEVEVKVKELRQTIPSLNNQQMSLRASFRKMKEKVTEMDEKISSAEFALVQSVQENANLRSKIIQSPDKLQRALEEKKSDRIEVKNAEKSAMQSFQEKSAILEVYTKAGKKMSKHFAQMQTIQEQVNSAKAIEKDLKVIKTKLSEEGVLEKSLEAKLVEWQGKVEQLDDLRKQLEKERDFKCEEAAKELNNVKLAVESSRHELEARQKKVEAQAAEVDGITLKINSVKESGAAKQQELISKGEEIMKEVHFH

SEQ ID NO: 171 - DNA, 1956 bp, Zea mays
ggcggtaggctgcgggctgtgcaatcgaaagttctgatagataaaaatgacacataccgaacgataaaccctaatgcaacatcttatcttatgtcttcgtttgaccggctcgccttattcatgggctccgcaagatttcagtggtgagctggtttcctagcagtggccagacactatgcctgggccgtcttgcgaaacgaaaccaacacttggttctgggcccaaagcctaaggccctaatccagttcttgttccttccaatttttccagcgccgggcgggcgggaagacgaaaacccaacgtcgccgcctgcgaaaggggaaaacccatccgatttcgattcgatttgccggcggtgcccgcggcggagaggatggcgagctccttctccttcccgctgatgaatccggcggacattgcggaggcgctgcacagctactgcatcgcgcccagccccggcctccgcgccgagcacatcgtcaccccgcagcccggcctcgtcgccgaggtcctcgccctcttcctcgccaacttcgtcggcgacgacgagcccgacgagcagctagagtttcaggcgctgcaggcgatcgacaacccggagcaccacatgcgcgccatagcgctctcgcgcctctaccggagggccaacgccttcctccactccatcctcttccgggacctcacgctccgcgaccttctccgcgccgacggccgccgtgtcgtctacatcctcagcgccataatcaacttcctccactacaggcaagataagctcagctttcttgagcccatcgtccaagagtacagcccccttcaggaacggcacacggagctcagggctaagatcgccgagcttcggaacgcaaaagaagaccatctacttaaggagcagatggaggcgcccgtggtccagcaactcgagaaggaggtcaatgccctcaaacagaggcttcgtgaatacaacaaagagcagctgtcgctgcgcgttgcaacaaaagccatagacgaaaagaaacaggagttactcggcaagatgaaccaagctgatttcgagttggtgaaagttatgcaagaaaaggaaaggctatcagccaaaattgttcattcccctgaaaagctcctgaggacccttgaggagaagaaagcagtccgtgatgagctaaggaactcagagaaggtggcaatgcaaaaagttcaagagaaaaccaatactcttgagacgtatactaaggtttctgagaaattagtgaagcatctctctaaaatttctgctgtacatgaaaaaggcactgttgctaaagcttctgagaaggatgttaaagcacacaaagagaagattggtgatcaaaatttggagataaaggcacttcgcaataaagctgctgagtggcaattgaaagtactcgagaacgagggcattctgaacgcaaaggagaaagaaagggatcaaagagttgcagagaacaatctgaagatgaacgcgttgaaatctgaagtcgaatcggagcacaagtgccttgaggagaaagaaataaaaataaaggaaaagcttgaaaaggttgctgaattatgctctcaagctgattcggttgctgaagctggaaataagaaaatacaggaaatctgtgggaagtataatcaagtttgcgaggctgcaaacatgtacatggatggcatcgatcgttcctttgaagagatcgatgaagctgcagtgagtttgaaagctataggccagagtggtgcttgatgcgtgaagtgaccatcgacgggcaatggatcgtggacagcatagtaaattgtgctagtgttaagctctgtatatatacctccaccgcgtctgtatatgccttcttcccactattttaatttaattagcactaattgccagtgaaaatggatatgtctaccgatcttgattaattctatttcaattcaaagcaacctacgccctgtcca

SEQ ID NO: 172 - protein, 457 aa, Zea mays
MASSFSFPLMNPADIAEALHSYCIAPSPGLRAEHIVTPQPGLVAEVLALFLANFVGDDEPDEQLEFQALQAIDNPEHHMRAIALSRLYRRANAFLHSILFRDLTLRDLLRADGRRVVYILSAIINFLHYRQDKLSFLEPIVQEYSPLQERHTELRAKIAELRNAKEDHLLKEQMEAPVVQQLEKEVNALKQRLREYNKEQLSLRVATKAIDEKKQELLGKMNQADFELVKVMQEKERLSAKIVHSPEKLLRTLEEKKAVRDELRNSEKVAMQKVQEKTNTLETYTKVSEKLVKHLSKISAVHEKGTVAKASEKDVKAHKEKIGDQNLEIKALRNKAAEWQLKVLENEGILNAKEKERDQRVAENNLKMNALKSEVESEHKCLEEKEIKIKEKLEKVAELCSQADSVAEAGNKKIQEICGKYNQVCEAANMYMDGIDRSFEEIDEAAVSLKAIGQSGA

SEQ ID NO: 173 - DNA, 1975 bp, Zea mays
ggcggtaggctgcgggctgtgcaatcgaaagttctgatagataaaaatgacacataccgaacgataaaccctaatgcaacatcttatcttatgtcttcgtttgaccggctcgccttattcatgggctccgcaagatttcagtggtgagctggtttcctagcagtggccagacactatgcctgggccgtcttgcgaaacgaaaccaacacttggttctgggcccaaagcctaaggccctaatccagttcttgttccttccaatttttccagcgccgggcgggcgggaagacgaaaacccaacgtcgccgcctgcgaaaggggaaaacccatccgatttcgattcgatttgccggcggtgcccgcggcggagaggatggcgagctccttctccttcccgctgatgaatccggcggacattgcggaggcgctgcacagctactgcatcgcgcccagccccggcctccgcgccgagcacatcgtcaccccgcagcccggcctcgtcgccgaggtcctcgccctcttcctcgccaacttcgtcggcgacgacgagcccgacgagcagctagagtttcaggcgctgcaggcgatcgacaacccggagcaccacatgcgcgccatagcgctctcgcgcctctaccggagggccaacgccttcctccactccatcctcttccgggacctcacgctccgcgaccttctccgcgccgacggccgccgtgtcgtctacatcctcagcgccataatcaacttcctccactacaggcaagataagctcagctttcttgagcccatcgtccaagagtacagcccccttcaggaacggcacacggagctcagggctaagatcgccgagcttcggaacgcaaaagaagaccatctacttaaggagcagatggaggcgcccgtggtccagcaactcgagaaggaggtcaatgccctcaaacagaggcttcgtgaatacaacaaagagcagctgtcgctgcgcgttgcaacaaaagccatagacgaaaagaaacaggagttactcggcaagatgaaccaagctgatttcgagttggtgaaagttatgcaagaaaaggaaaggctatcagccaaaattgttcattcccctgaaaagctcctgaggacccttgaggagaagaaagcagtccgtgatgagctaaggaactcagagaaggtggcaatgcaaaaagttcaagagaaaaccaatactcttgagacgtatactaaggtttctgagaaattagtgaagcatctctctaaaatttctgctgtacatgaaaaaggcactgttgctaaagcttctgagaaggatgttaaagcacacaaagagaagattggtgatcaaaatttggagataaaggcacttcgcaataaagctgctgagtggcaattgaaagtactcgagaacgagggcattctgaacgcaaaggagaaagaaagggatcaaagagttgcagagaacaatctgaagatgaacgcgttgaaatctgaagtcgaatcggagcacaagtgccttgaggagaaagaaataaaaataaaggaaaagcttgaaaaggttgctgaattatgctctcaagctgattcggttgctgaagctggaaataagaaaatacaggaaatctgtgggaagtataatcaagtttgcgaggctgcaaacatgtacatggatggcatcgatcgttcctttgaagagatcgatgaagctgcagtgagtttgaaagctataggccagagtggtgcttgatgcgtgaagtgaccatcgacgggcaatggatcgtggacagcatagtaaattgtgctagtgttaagctctgtatatatacctccaccgcgtctgtatatgccttcttcccactattttaatttaattagcactaattgccagtgaaaatggatatgtctaccgatcttgattaattctatttcaattcaaagcaacctacgccctgtccaggcccacggaattttctac

SEQ ID NO: 174 - protein, 457 aa, Zea mays; identical to SEQ ID NO: 172

SEQ ID NO: 175 - DNA, 637 bp, Brassica napus
catgattcagaatctgaatgggacgaatatcagcagcgagattgtaattttgtttcgagagctcatgcaagctcagctattgaactccgaccaagtgaccaagttgaatcttgtattcctggcgagtagaaaacaaatgctgaggaatggaactctagaggagacagttgaagaacaaatgcaacggacagtttcatcaattcatgatcatggtgaagtctgtagctatcttgttgatttgatggtatctaattcttgtggacacacaagtggtggaagcgaaacaacatgtaggcagaagaagaaacatgtactcgttgaaatggaacgattctccgaactactatcaacaagaagagataaagttactgattcaaggccgtgtaaggtctatgcaagacagagaaagaggataaatgcaatatgggacaaatcgtgaagaacagcagatctctagtgtttgtacaggttgaattgtgcatacttaaaggtccagctttctaattttgttaaccaaatttccactatatactggtaagttcttggtgtggtttccacgtttatgaatatatagacagttatatgacatcagaaggactgtaaacattcgaaccttacaaagagaaactaagaaccc

SEQ ID NO: 176 - DNA, 3618 bp, Brassica rapa
atggatacgatctctcttctctgttccgctgaggaatgttccgtcagcgaggagtttgtggagagagtctctgctcagctctcttctggtgccttgggttggagccgacgacagcttcacatgatgtggatgacccctttgttctttatatcttgtgtgtatgaggcatgttgtgatttatcttttctttgtcatgctagcgaggagatccgcggtgaaatctttttcgttctgtacaaattttctgctctacagttcacagaacaggatgttgatggagctgagattctttcttcattgtctcctaagctcctatccctatccttggaggctcttgctaagacacagagagatgaggttcgcttgaattgtatagcccttttgaccacattgacccagcaaggtctcttagcaaattcacgtacaagtcctgtcagcagcatgagcttggatgaagtggatgatgaccccatgctgacggctgagactgtaactgtcaggccttgtttagatatcttgtttgctgaagccatcaaaggtccgttgctttccactgacagcgaggtgcaaataaaagcccttgatcttatcttccattatgtgtcccaagagagtgttccaagcaaacagattgaagttttggtagaagaaaatgttgctgattatatatttgagatactgcggttatcagagtgtaaagatcatgtcatcaacccatgcctcagagttcttgatttgttttccctagccgagctttcctttcggaagaaacttgttattgggtttccttcagtcatccaagtgcttcactatgtaggcgaagttccttgtcatccttttcaagtccagacactaaagcttgtttctagctgtatttctgatttccctgagatcgcttcaagctctcaagttcaggaaatttctctggttctgaaaatgatgcttgaaagatattattctcaagagatgggattatttccggatgcctttgcaattatctgctcagtctttgtttccctaatgaaaaccccatcttttgctgagactccagatgtgtttaaatcattgcaagactccctaagacatgccgttttggtatgtcttagtctccctgagaaagattcaactcagatctcgcatgcagtctacttgctcaataaagtatatgcatactgtacttcaccaacatccataaacaatactggttgcattgaattaagacaatgtgttatagatgtgtgtgtatcacatctactaccgtggtttctttctgatgtcaatgaggtcaatgaggaagcaattcttggcataatggaaagctttcacttcattcttcttcagaattcagatgttcaggccatggagtttgcggagatacttgtttcagcagattggttcagctttgcatttggatgtctaggaaacttctctagtgataagatgaaacagagggtatatcagatgctcagttcccttgttgatgttcttcacagacagaaattggggtcgcatatcagagatgctcttttctgtcttccttctgatccacaagatttgctgtttttgctcgggcaagatagttccaacaatcaagagttggcttcttgccagtttgcagctttggttattttccataccggttggatacacaatgacaggcttgcagatgataagcttgttttcgcttctttggagcaatacattcttgtcaacaggacaagtttaatctcggattctccagctgtgctgcaactagtgaatctatatagtctttgcaggagtcttcaaaacaagcgataccagatatcttacagtctagaagccgagaggatagtcttccatctactaaacgaatatgattgggacttgggttcctgtgatattcatctagaatcgctcaagtggctttttcaacaagaaagtatcagcaaaggtttaacttaccagatccaaaagatttccaggaacaacttaattggaaaagaagttcacaatgtatatggagatggcagacagagatcactcacgtattggttcgcaaagatgatatcagaaggagacaactatgccgcaactcttttggttaacttgctgacccaccttgcagagaatggagacaaagagagtgatgttatctcaattttaaatataatgacgacggtcgtttctaaatttccaactgcctccaaccatttatccatgaatggcattgggaatgcaattcatagactcgtttgtagttttagaaactcatccatgggaacatctttccctacactacttgtgctaatattcaacattctagcttctgtgcaacctggagtgctcaaaaatgatgaatcctggaatgctgtgtttattaagttgttacactatttaagcttgcgagacactgccataacacagccagaccatgaaggtatgatggtgattggcattctttgcttggttctgtaccactcatcacatggagcacttttggattcttcaagaattatcatggtgaattcgtacttggtatcggcaatcaacaatgttgttgatgtagcttgctcaaggggtccagcattgactcagtctcaggatgaaactgaaatctgggaggctctagcattcacattacctctctgcttttcctcgttaagaagcctgcagattgttctcgctggagctgtggattggcaaactttctgtggcccatcgagcaacctggaaacactacccgtagtctgcatccattgccataatttgtgcaggttgatgcattttggaacaccgcaaatcaagctcatggcctcttattgtctcttagagctgttcactggactgtcacaacagattgacattagaaaagagcaactacgttgttcatcgagttaccttaaagcaatgaaggctgttttatgtggtctggtattctatgatgacataagagtagccacaaactctgcgctttgtctgtccatgataataggatgggaagacatggaaggaagaacagagatgcttaagacctgctcatggtacaggtttattacagaagaaatgtcagtgtcattggccatgccgtgttctgcatcaaatacctttgtgaaccaccacaagcctgcagtctatgtaactgtcgccatgctaaggctgaagaacaaaccggtgtggctgagaagtgtttttgatgagtcttgcatctctagcatgattcagaatctgaatgtgacgaatatcagcagcgagattgtgattttgtttcgagagctcattcaagctcaactattgaactccgaccaagtaaccaagttgaatctcgtattcctggcaagcagaaaacagatgcaaaggaatggcactctagacgagacagttgaagaacaaatgcaacggacagtttcatcaatccatgatcatggtgaagtctgcagctatcttgttgacatgatgctatctagttcttttggacacacaagtggaagcgaagcaacatgcattcagaagaagaaacaggttctcgctgaaatggaacaattctccgaactattatcaacaagaagagattatgttactgattcaaggccgtgtaaggtctatacaagacagagaaagaggatacatgcaaaatga

SEQ ID NO: 177 - protein, 1205 aa, Brassica rapa
MDTISLLCSAEECSVSEEFVERVSAQLSSGALGWSRRQLHMMWMTPLFFISCVYEACCDLSFLCHASEEIRGEIFFVLYKFSALQFTEQDVDGAEILSSLSPKLLSLSLEALAKTQRDEVRLNCIALLTTLTQQGLLANSRTSPVSSMSLDEVDDDPMLTAETVTVRPCLDILFAEAIKGPLLSTDSEVQIKALDLIFHYVSQESVPSKQIEVLVEENVADYIFEILRLSECKDHVINPCLRVLDLFSLAELSFRKKLVIGFPSVIQVLHYVGEVPCHPFQVQTLKLVSSCISDFPEIASSSQVQEISLVLKMMLERYYSQEMGLFPDAFAIICSVFVSLMKTPSFAETPDVFKSLQDSLRHAVLVCLSLPEKDSTQISHAVYLLNKVYAYCTSPTSINNTGCIELRQCVIDVCVSHLLPWFLSDVNEVNEEAILGIMESFHFILLQNSDVQAMEFAEILVSADWFSFAFGCLGNFSSDKMKQRVYQMLSSLVDVLHRQKLGSHIRDALFCLPSDPQDLLFLLGQDSSNNQELASCQFAALVIFHTGWIHNDRLADDKLVFASLEQYILVNRTSLISDSPAVLQLVNLYSLCRSLQNKRYQISYSLEAERIVFHLLNEYDWDLGSCDIHLESLKWLFQQESISKGLTYQIQKISRNNLIGKEVHNVYGDGRQRSLTYWFAKMISEGDNYAATLLVNLLTHLAENGDKESDVISILNIMTTVVSKFPTASNHLSMNGIGNAIHRLVCSFRNSSMGTSFPTLLVLIFNILASVQPGVLKNDESWNAVFIKLLHYLSLRDTAITQPDHEGMMVIGILCLVLYHSSHGALLDSSRIIMVNSYLVSAINNVVDVACSRGPALTQSQDETEIWEALAFTLPLCFSSLRSLQIVLAGAVDWQTFCGPSSNLETLPVVCIHCHNLCRLMHFGTPQIKLMASYCLLELFTGLSQQIDIRKEQLRCSSSYLKAMKAVLCGLVFYDDIRVATNSALCLSMIIGWEDMEGRTEMLKTCSWYRFITEEMSVSLAMPCSASNTFVNHHKPAVYVTVAMLRLKNKPVWLRSVFDESCISSMIQNLNVTNISSEIVILFRELIQAQLLNSDQVTKLNLVFLASRKQMQRNGTLDETVEEQMQRTVSSIHDHGEVCSYLVDMMLSSSFGHTSGSEATCIQKKKQVLAEMEQFSELLSTRRDYVTDSRPCKVYTRQRKRIHAK

SEQ ID NO: 178 - DNA, 3657 bp, Glycine max
ggccatcgatcttcgttgaaccttcaaacgcacgatgaaggtggctccctctgcctcgtgtgcttctccaaccttgtctccaatcctctctccccaaccgtccatgtctcctacgctctctcccagctctctcgctccctctccatccctcacttccttcaatcccttctcactttccaccctcacttcctcctctcccctctcctcgccgccctctcctccttccacgaccaacctatcgccgctcagctcacgcatctcatcctctctctctcttcctccgctgatccttccctttgctcccaattcatcgctaggatttccgatcgcatcgcttccgctgctttgggttggacttcccctcagttgcacatgattcactgccttggggctcttctgaattgtgagaaggatgatgatctccatgcacacatcaaagacatgtatagtttcatttctgttcttgttacgggccttcaattgccgagtgaggagattcgcggggaggttctctttgtcctttacaaactatatgttcttcagagtacatcagcagggggagatggaagtgatatgttgattcccttctgtccacagatcttgtatctgttggtggatgttctcatgaagactcaaaatgatgatgttcgcttgaattgtattgcacttttgactatgctggctcgaagacatttgctcagggaagaatgtgcatacgatactagtaacatgtcttccaatggaggagttaactctaaagaaaccgaggacggaaccaagggcacatctctggtaaatctgtttgctgaagccatcaaaggcccattactttcgtcagacagtcaagtccaaatcggcactctagatttactctttcactatttgtcttcggtcagaaattcagactatcagattcgagttttggtggaagaaaatattgcagattatttatttgaaatattaagattatcagagtataaggacccagcagtcaagatgtgccttcagacactgaagctcatttatgaatgcatttctgagtgccctggatctgtatcaacttctcaactagaggagctgattcttgttttgataagaatgcttagaaagcattctgatggggagatgggtatgattcccgagacgtttataatggtctgctctatctttgttgctcttataagatctccatcttgtaatggagctttagatctctcaaaatcgattgaggaagcaacgaaccatgccattttagcttgtctctctgtctctgaaaggaacataaaccaaattttgcaatgtttgtacctacttaaagaggcatatgcatatagtcatgatggaaactccattaactctagtaagctggagcttagaagtggcattctagatatatgcagaacccatttactgccatggcttgtagtgggcatcaatgaaatggaagaggacattgccctgggattgctggaaacttttcattcgatattgcttctgcactctagtattaattccatggaatttgcagagactctgatttcaatcggttggttcagtttttcatttgaatgtctgggtttgtttacaggagataggatgaaaaatagaatatatttgttgctcagttcactcatggattctctcctgggaaatgattctggacaaccaattagagaggctgctttgcacctgcctcgcgatcctattgatttactctttttgcttgggcaaaggagtactaacagtttggatttgccttcttgtcaatctgctgttttgctgattatgtacaccagttcgctatatgatgaaagttcactaaggggtcttggcagtatgaactaccaaattcactatagtcgagatgcggaggagataatattccagctcataaacaatgatgaatgggacttactttcagcaagaattcacacggtgtcattgaagtggctgtttcaacaagagaacataatcaactcattaagccatcagattttgaaattctgcagaagctataacttagaagaggctgacataattatcggaaacaattatcaaactgtaaatgtacagacactttcggagttggtatcaactgaagataactatggagctagacttttcgtgtgcttattagcacagctcttggaggaagaaggccgggaatatgatataatatgtgttctgaatgtcatggcaactatggttctcgtctgtccagctgcttgtgaacaattatctttgcatggaatagcgacaacaatcaggacttggtgttatttgagcaatagcttgtcgacaacaacatacatgtccatcttgattttggtttttaacactttgagttcagtgcatcctgaaacactatcggttgatcaaagctgggtagcgataaccatgaaggtgtgggtagctgaacttctatttattcacattgcatcccgtataaattcaatcatgatcatgattagagactctgatttttatatgatggagtgttcaattccatccaaagaggttgatatcttgagtgacgaaagcctctttgttattggcattctttccttaattttgcatctttccaccaataaagcacttgaagagacttccaaggccattctttttaatacttgtataatctccatggtcaacactgtagtctgcgcggcttcttcgaagggacctgctttggttgaccatgacgagggaacaagtacaggagaaactttaatatttgttcttttgcttcattacttcgccgttaaaagcttgcatgctattctaccagggttcgtggattggcaaagcttctttgcttcaacgaatccatccgagccgctagccttcattggaatccgttgccatgacttgtgcagacttctgcattttggttcaactgtaatcaagattgctgcttcttatagcctgttagagttatttaaaagaatatcagatcaaataaacagtaatcatgaagagttgagatgtactattgggtacataatgtccataaggagtatattggaagggctagttttctataatgatctgagagtggctacaaattgttccctctgtctgtcaatgattctgggatgggaaaagctgacaaaggaaacaaaagtcttagaagagagtagctggtgtagattgattatagaggagatgacagtatctttggcagctcctgctttagcatcacaatcattcatgaacaaccaaaggcctgcagtgcttgtagctattgcgttgctgaaactgcataaaatccctcagtggatgagatctgtgtttgataattcaagcatatctggcatattggggaacctttctgctagtaacttgagctcggagattttggctttatttcgagaactactgaaatctaacttcttaagtacagagcaaattgcaactataaatcaaatgctccaggaatgcagaaagcgtatgtacagtaacaatgctcaagaggatctcccaaatgagccgataaagaaggtcctcaccacatcgtataatatgggagacatttgtgagtatctcattgatttaatgacatcagaggcgtacttagatacgggcagtaagaagctcttagaagaaattgagctgtttttcagtaccttgtctgtagataatggtagttgtatgtag

SEQ ID NO: 179 - protein, 1218 aa, Glycine max
GHRSSLNLQTHDEGGSLCLVCFSNLVSNPLSPTVHVSYALSQLSRSLSIPHFLQSLLTFHPHFLLSPLLAALSSFHDQPIAAQLTHLILSLSSSADPSLCSQFIARISDRIASAALGWTSPQLHMIHCLGALLNCEKDDDLHAHIKDMYSFISVLVTGLQLPSEEIRGEVLFVLYKLYVLQSTSAGGDGSDMLIPFCPQILYLLVDVLMKTQNDDVRLNCIALLTMLARRHLLREECAYDTSNMSSNGGVNSKETEDGTKGTSLVNLFAEAIKGPLLSSDSQVQIGTLDLLFHYLSSVRNSDYQIRVLVEENIADYLFEILRLSEYKDPAVKMCLQTLKLIYECISECPGSVSTSQLEELILVLIRMLRKHSDGEMGMIPETFIMVCSIFVALIRSPSCNGALDLSKSIEEATNHAILACLSVSERNINQILQCLYLLKEAYAYSHDGNSINSSKLELRSGILDICRTHLLPWLVVGINEMEEDIALGLLETFHSILLLHSSINSMEFAETLISIGWFSFSFECLGLFTGDRMKNRIYLLLSSLMDSLLGNDSGQPIREAALHLPRDPIDLLFLLGQRSTNSLDLPSCQSAVLLIMYTSSLYDESSLRGLGSMNYQIHYSRDAEEIIFQLINNDEWDLLSARIHTVSLKWLFQQENIINSLSHQILKFCRSYNLEEADIIIGNNYQTVNVQTLSELVSTEDNYGARLFVCLLAQLLEEEGREYDIICVLNVMATMVLVCPAACEQLSLHGIATTIRTWCYLSNSLSTTTYMSILILVFNTLSSVHPETLSVDQSWVAITMKVWVAELLFIHIASRINSIMIMIRDSDFYMMECSIPSKEVDILSDESLFVIGILSLILHLSTNKALEETSKAILFNTCIISMVNTVVCAASSKGPALVDHDEGTSTGETLIFVLLLHYFAVKSLHAILPGFVDWQSFFASTNPSEPLAFIGIRCHDLCRLLHFGSTVIKIAASYSLLELFKRISDQINSNHEELRCTIGYIMSIRSILEGLVFYNDLRVATNCSLCLSMILGWEKLTKETKVLEESSWCRLIIEEMTVSLAAPALASQSFMNNQRPAVLVAIALLKLHKIPQWMRSVFDNSSISGILGNLSASNLSSEILALFRELLKSNFLSTEQIATINQMLQECRKRMYSNNAQEDLPNEPIKKVLTTSYNMGDICEYLIDLMTSEAYLDTGSKKLLEEIELFFSTLSVDNGSCM

SEQ ID NO: 180 - DNA, 3043 bp, Glycine max
attcactaccttggggctcttctgaattgtgagaaggatgatgatctccatgaacacatcaaagacatgcatagtttaatttctgttattgttacgggccttcaattgccgagtgaggagattcgtggggaggttctctttgtcctttacaaactatctgttcttcagagtacatcagcagagggagatggaagtgatatgttgattcccttctgtccacagatcttgtacctgttggtcgatgttctcatgaagattcaaaatgatgatgttcgcttgaattgtgtcgatttcctgctagtatctttttctccgagagtttgcatctatagcttatatcctaaccaccaaagtttcaggctcaatgaacgagtaattgatgtcaatcattccaaggctgaatgtgcatacgatactagtagcatgccttccaatggaggagttaactcaaccgaggatggaaccaagggcacatctctggtaaatctgtttgctgaagccatcaaaggcccattactctcgtcagacagtcaagttcaaatcggcactctagatttactctttcactatttgtcttcagtcagaacttcagactatcagattcgagttttggtggaagaaaatattgcagaatatttatttaaaatattaagatcgtcaggagagaactttgaaacctttaaactaagactcgttgttggaatttctactctgatcccaacattacggtatgtggctgaagttccttttcaccctgtccaatgtgagacactgaagctcatttatgaatgcatttctgagtgccctggatctgtatcaacttttcaactagaggaactggttcttgttttgataagaatgctttctgatggggagatgggtattattccagagacgtttataatggtctgttcagtctttgttgctcttataagatctccatcttgtaatggagctttagatctgttaaaatcaattgaggaagcaacgaaccatgccattttagcttgtctctctgtctctgaaaggaatataaaccaaattttgcaatgcttgtacctacttaaagaggcatttgcatatagtcatgatggaaactccattaactctagtaagctggagcttagaagcagcattctagatatatgcagaacccatttactgccaaggcttgtagtgggcatcaatgaaatggaagaggacattgcccttggattacttgaaacttttcatttgatactgcttctgcactctagtattaatgccgtggaatttgcagagagtctgatttcaatcggttggttcagtttttcatatgaatgtctgggtttgtttacaggagataggatgaaaaatagaatatatttgttgctcagttcactcatggattctctcctgggaaatgattctggacaaccaattagagagactgctttgcacctgccttgcgatcctattgatttactctttttgcttgggcaaaggagtactaagagtttggatttgccttcttgtcaatctgctgttttgctgattatgtacactagttcgctatatgatgaaagattggcaattaattccttgacgtctattttccctaacagttttctgacttccattgccagacttgcagatgagaagttggttttagcttctcttgaacaatatattcttcttaatagtggtaattttcataatcggaccactgataatttgaccgtgacacaactggtgaatctttacagtttactaaggggattactttcagcaagaattcacacggtatcattgaagtggttgtttcaacaagagaacataatcaactcattatgccatcagattttgaaattttgcagaagctataacttagaagaggctgacataattataggaaacaataatcaaactataaatgtacagacacttgcggagttggtatcaactgaagataactatggagctagacttgtcgtgtgcctattagcacagctcttggaggaagaaggccaggaacatgacataatatgtgttctgaatgtcatggcaactatggttctcatctgtccagctgtttgtgaacaattatctttgcatggaattgcgacaaaaatcaggacttggtgttatttgaataacagcttgtcgacaagaacttacatgtccatcttgattttggtttttaacactttgagttcagtgcatcctgaaacactatctactgatcaaagttgggtagcggtaaccatgaagatgatggagtattcaattctatccaaagaggttgatatcttaagtgacgaaagtctcttcgttattggcattctttccttaattttgtatctttccaccaataaagcacttgaagagacttccaaggccattctttttaatacttgtataatctctatgggacctgctttggttgaccatgacgagggaacatgcacaggagaaactttaatatttgtaagccggttcgaatcagtaataagaaaccttttatattctagcttgcatgctatcctaccagggttcgtggattggcaaaacttctttgcttcaacgaatccatcggagccgctagccttcattggcatccgttgccatgacttgtgcagacttctgcattttggttctcctgtaatcaagattgctgcttcttatagcctgttagagttatttaacagaatatcagatcaaataaacagtgatcatgaagagttgagatgtactattgggtacttaatgcccataaggattggaaggaatgtcttagaagagagtagctggtgtagattgattatagaggagatgacagtatctttggccgctcctgctttagcatcacaatcattcacgaacaatcaaaggcctgcagtacttaaaggtattgcgttaatgaaactgcataaaatccctcagtggatgagatctgtgtttgataattcaagcatatctggcatattggagaaccttgcagctagtaacctgagctcagagattttggctttatttcgagaactactgaaatttaacttcttaa

SEQ ID NO: 181 - protein, 1015 aa, Glycine max
  misc_feature (1015)..(1015): Xaa can be any naturally occurring amino acid
IHYLGALLNCEKDDDLHEHIKDMHSLISVIVTGLQLPSEEIRGEVLFVLYKLSVLQSTSAEGDGSDMLIPFCPQILYLLVDVLMKIQNDDVRLNCVDFLLVSFSPRVCIYSLYPNHQSFRLNERVIDVNHSKAECAYDTSSMPSNGGVNSTEDGTKGTSLVNLFAEAIKGPLLSSDSQVQIGTLDLLFHYLSSVRTSDYQIRVLVEENIAEYLFKILRSSGENFETFKLRLVVGISTLIPTLRYVAEVPFHPVQCETLKLIYECISECPGSVSTFQLEELVLVLIRMLSDGEMGIIPETFIMVCSVFVALIRSPSCNGALDLLKSIEEATNHAILACLSVSERNINQILQCLYLLKEAFAYSHDGNSINSSKLELRSSILDICRTHLLPRLVVGINEMEEDIALGLLETFHLILLLHSSINAVEFAESLISIGWFSFSYECLGLFTGDRMKNRIYLLLSSLMDSLLGNDSGQPIRETALHLPCDPIDLLFLLGQRSTKSLDLPSCQSAVLLIMYTSSLYDERLAINSLTSIFPNSFLTSIARLADEKLVLASLEQYILLNSGNFHNRTTDNLTVTQLVNLYSLLRGLLSARIHTVSLKWLFQQENIINSLCHQILKFCRSYNLEEADIIIGNNNQTINVQTLAELVSTEDNYGARLVVCLLAQLLEEEGQEHDIICVLNVMATMVLICPAVCEQLSLHGIATKIRTWCYLNNSLSTRTYMSILILVFNTLSSVHPETLSTDQSWVAVTMKMMEYSILSKEVDILSDESLFVIGILSLILYLSTNKALEETSKAILFNTCIISMGPALVDHDEGTCTGETLIFVSRFESVIRNLLYSSLHAILPGFVDWQNFFASTNPSEPLAFIGIRCHDLCRLLHFGSPVIKIAASYSLLELFNRISDQINSDHEELRCTIGYLMPIRIGRNVLEESSWCRLIIEEMTVSLAAPALASQSFTNNQRPAVLKGIALMKLHKIPQWMRSVFDNSSISGILENLAASNLSSEILALFRELLKFNFLX

SEQ ID NO: 182 - DNA, 3831 bp, Medicago truncatula
atggattcagagagcatagatattgaagacgaaggcgattcacggtggtgctgttctcaaggccaccgttcatctctaaaccttcaaacaaaccaaggcggcacgatctgtctcgtgtgtttctccaacctcatctctaacccttcctctccaactatccatgtatcttacgctctctcacagctctctcgttctctctccattcctcaattccttcactctatcgtcacttttcaccctcacttccttgtttcacctctcgtcgctgctctttcctctttcgacgatgaacctatcgcagaacaactcgttcatctcatcctcaacctctctgcttcatccgatccttccgtttgccgtgagttcgtcgctagggtttcagatcgcgtttcttctggtgctttaggttggagttcgcgtcagttacactcgcttcactgcctaggggttcttctgaattgtgagaaggaggatgatctccatgtacacatcaaagatgtttatagcctcatttccgttctggttaccggtcttcaattgcctagtgaggaaattcgtggagaagtcctttttgtgctttacaaactatttgctcttcatagtacatcagatgagggtgatggaagtgatatgttgattcccttttgtccaaagcttttgtacctgttgggagatgttctcttgaagactcaaaatgatgatgttcgcttgaattgtattgcacttttgacaatgctggctcaaagacagttgctcagggaagaacctgcatatgatactgggaacatgtctttatctggtgaagttaattttaaagaaactgaagatgtaccagagggagcatctctggttaatctgttcgccgaagcaatcaaaggcccgttgctttcatcagtcagccaagtccaaatcggagctctagatttgctctttcattatttatcttcagttgggacttcaggcaatcagattcaagtcttagtggaagaaaatattgcagattatttatttgaaatattgagattatcagagaacaaggatccggcagtcaagatgtgccttcaggtacttgatctattatcgaattcagaggaagcttttagaccgaggctggttgttgggttttcaactctggttcctgtactgcgttatgtgactgaagttccttttcatccagttcaatacgagacactgaagctcatttatgaatgcatttctgagtgccctggagctgtatcaacttctcagatggaggaacttgtgcttgttttgataaaaatgcttacaaagcattctgatggggagatgggaatgattcctgagacgtttataatggcttgctcagtatttgtggctcttatgagatctccatcttgtaatggagctttagatctgtcaaaatcaattgaggaagcagtcaaacaagccatcttagcttgtctctatgtctctgagaggaatatcaaccagattttgcaatgcttctatctacttaaagaggcatatgcctacagtcatgatgaaaactccactcacataagcaaactagaacttagaagcgggattctagatatatgcagaacacatttactgccctggcttgcaacaggcatcatgaaatggaagaagaattattcctggtattattctagggaattcgcagagactttgatgtcattctgctggttcagtttttcatatgggtgtctgggattgtttgcaggtgatagaatgaaacatagaatatatttgttacttggttcactcatagattctctaataggaaatgatactggacaacctattagagatgctgctttacacctgccttctgaccctgtcgatttactctttatgctggggcaaagaagtacagatagtttagatttttcttcttgtcaatctgctgcattgctaattatgtacaccagttcattatatgatgaaagacttgcagatgataatatggctttagcttctcttgaacagtatgttcttcttaatagcagtgactctcataattggacaactgatagtttgacagtgactcgactggtgaacctctacagtttgttgaggggtcttggcaatatgaactatcaaattcactatagtcgagaagctgaggagattatattccagctcataaacaatggtgaatgggatttactttctgcaagaattcacacagtatcattaaagtggttgtttcaacaagagaatataatcaactcactgtgtcatcagattttgaaattctgcagaaacaataacttagaaggggatgacatgattattggaaacagtaaccaaactgtaaatgtacagacacttgcagagttagtatcctctgaagataactatggagctagacttttcatatgcttattggcacagctcgctgaggaagaaggccaggaacatgatataatttctgttctgaatctaatggcaactatgattcatatatgcccagctgcttctgaccaactatctttgcatggaatagggacaacaatcaggacttgttgcttctccacagcaactttcatgtccatcttggttttggtttttaacactttaagttcagtgcatcctaaaacactatcaactgatcagagctgggttgcagtaaccatggagatgatggagtactctattccatcaaaagaggcagatatcttaagtcaagaaagtctcttcgtcattggcattctttccttgattttacatctttccaccaataaagtacttaaagagacttcaaagaccattctctttaatacttgtataatctctgttgtcaatactatagtgtgtgcagcttcttcaaaaggaccggctttggttgaccatgacgagggaacaagcaccggagaaactttaatatttgttcttttgcttcatatctttgctgttaaaagcttgcacgctatccttccagggtttgtggattggcaaaaattccttgtttcaatgaattcatcagaaccactagccttcataggcatccgttgtcatgatttgtgcagacttctgcattttggttctcccgttgtcaagattattgcttcttacagcctgttagaattgttcaacagaatatcagatcaaataaacactaaacaggaagagttgaaatgtactgttgggtatttaatgtccataaggagtatattggaagggatggtattttataatgatctgagagtggctaccaattgtgcactctgtctgtcaattcttctgcgatgggaaaatctagcaaaggaaacggaacagttaggaaagagcagttggtgtagattgattatggaggagatgacagtatctttggcagctcctgctttagcatcacaatcattcatgaacaatcaaacgcctgcagtccttgtagctagtgcgttgctgaaactgcataaaatcccccagtggatgagatctgtgtttaacaattcatgcatatctggcatactggagaaccttgctgctaataatttgagcccggaaattttggttttatttcgagaactactgaaatctgacttcttaagtactgagcaaattgcaactataagtcaaatgctgcaggaatgcagaaaacaaatgtacactaacaatgctcaagacggtctcccaagtgaaccaataaagaaggtccttgccacatcatatgatcttggagatgtttgctggtttctcattgacttgatgtcaccagacacattagatatggattcctgggggattcatatggacggtaaaaggctcttggaagaaatagagttgtttttcagcaccttgactgtagatgataatagctgcagataa

SEQ ID NO: 183 - protein, 1276 aa, Medicago truncatula
MDSESIDIEDEGDSRWCCSQGHRSSLNLQTNQGGTICLVCFSNLISNPSSPTIHVSYALSQLSRSLSIPQFLHSIVTFHPHFLVSPLVAALSSFDDEPIAEQLVHLILNLSASSDPSVCREFVARVSDRVSSGALGWSSRQLHSLHCLGVLLNCEKEDDLHVHIKDVYSLISVLVTGLQLPSEEIRGEVLFVLYKLFALHSTSDEGDGSDMLIPFCPKLLYLLGDVLLKTQNDDVRLNCIALLTMLAQRQLLREEPAYDTGNMSLSGEVNFKETEDVPEGASLVNLFAEAIKGPLLSSVSQVQIGALDLLFHYLSSVGTSGNQIQVLVEENIADYLFEILRLSENKDPAVKMCLQVLDLLSNSEEAFRPRLVVGFSTLVPVLRYVTEVPFHPVQYETLKLIYECISECPGAVSTSQMEELVLVLIKMLTKHSDGEMGMIPETFIMACSVFVALMRSPSCNGALDLSKSIEEAVKQAILACLYVSERNINQILQCFYLLKEAYAYSHDENSTHISKLELRSGILDICRTHLLPWLATGIMKWKKNYSWYYSREFAETLMSFCWFSFSYGCLGLFAGDRMKHRIYLLLGSLIDSLIGNDTGQPIRDAALHLPSDPVDLLFMLGQRSTDSLDFSSCQSAALLIMYTSSLYDERLADDNMALASLEQYVLLNSSDSHNWTTDSLTVTRLVNLYSLLRGLGNMNYQIHYSREAEEIIFQLINNGEWDLLSARIHTVSLKWLFQQENIINSLCHQILKFCRNNNLEGDDMIIGNSNQTVNVQTLAELVSSEDNYGARLFICLLAQLAEEEGQEHDIISVLNLMATMIHICPAASDQLSLHGIGTTIRTCCFSTATFMSILVLVFNTLSSVHPKTLSTDQSWVAVTMEMMEYSIPSKEADILSQESLFVIGILSLILHLSTNKVLKETSKTILFNTCIISVVNTIVCAASSKGPALVDHDEGTSTGETLIFVLLLHIFAVKSLHAILPGFVDWQKFLVSMNSSEPLAFIGIRCHDLCRLLHFGSPVVKIIASYSLLELFNRISDQINTKQEELKCTVGYLMSIRSILEGMVFYNDLRVATNCALCLSILLRWENLAKETEQLGKSSWCRLIMEEMTVSLAAPALASQSFMNNQTPAVLVASALLKLHKIPQWMRSVFNNSCISGILENLAANNLSPEILVLFRELLKSDFLSTEQIATISQMLQECRKQMYTNNAQDGLPSEPIKKVLATSYDLGDVCWFLIDLMSPDTLDMDSWGIHMDGKRLLEEIELFFSTLTVDDNSCR

SEQ ID NO: 184 - DNA, 1554 bp, Oryza sativa
gtttgttccttattgatattcaacattttacattcagcaagtgcaatgacattcacctgtgatgatgatgcatggcttgctcttaccatgaagctattggattgtttcaattctagtcttgcttatacatcaagtgagcaagaatggaagatattaattgggatattgtgccttattttaaaccattcagcaaacaaggtgcttattgagcctgcaaaagccataatcttgaataattgtttggctttgttgatggatggtatagttcaagaagcttgtgcaaagggcccatctttatttcaacacaatcaggagacaacctttggggaattattgattcttatgcttttattgatatttttctctgtacgaagcctgcaagcgatcttagaggcaagcattgactggcaggaattcctgcaatattcagatgacactgagtcttcctctgttcttggcattccgtgccatgatttgtgtcgtctcatgcactttggcccttctcccgtaaagcttattgcttcacaatgcctgttggaattgcttaacagaatttcagatcagaggagctgtcttaatgctgagttaagatgctctgcaaagtatctgaagtccatgattgcagtgacagagggaatggtcttcgatcaagatagtagagttgctgaaaattgtggtgcctgtctcacggtgattttaggttgggagagatttggaagcagagagaaggcggtgatcagagaatctaaatggtctaggttaatattggaggaatttgcagttgccttgactgctcctggtttgacatccaaatccttcagtaatcagcagaagattgcagcaaatatagctctttcattgctccaactgagccaagtaccagattggttgacatcgttgttcagtgattctttgatatctggtatagttgctaatctttctgctaggaatgttaccgcggaaattgtcactctcttcagtgaacttatggccaaaaactatctcaatcaagaacacattgctggtctacacaacttgttccaggtctgcaggagacaggcctatgagggaggcggcggctcgaaggcgcagccctcggagcagaaggctgcggcggcgagatgcgccgacgacgtgcgtgctttgctcttcggcatgatgctggagcagcgggcgtgctctcgcgccaccgttgagatggagcagcagagacttctccgtgagatcgactctttcttcttccaggagtcgagcctgcgagaacagaacagcgtgaagtaacccaagtctcaaggtcttaaggccagcccccggccaacaaaccaggcacctcgtacagctcccccctaatccgtatagttttttttttttttgacattcctaatctgtatagatgcttataagtaattagggatactcacatcttccttgttgatagtgtttaaagggcgcaaaaattaatttgcccctcaatcatgaaaattgttgaagctccatgccaaaattggtctgcaaaagcaacccttaaacgaaatggaatacaccaatctttcg

SEQ ID NO: 185 - protein, 411 aa, Oryza sativa
MTFTCDDDAWLALTMKLLDCFNSSLAYTSSEQEWKILIGILCLILNHSANKVLIEPAKAIILNNCLALLMDGIVQEACAKGPSLFQHNQETTFGELLILMLLLIFFSVRSLQAILEASIDWQEFLQYSDDTESSSVLGIPCHDLCRLMHFGPSPVKLIASQCLLELLNRISDQRSCLNAELRCSAKYLKSMIAVTEGMVFDQDSRVAENCGACLTVILGWERFGSREKAVIRESKWSRLILEEFAVALTAPGLTSKSFSNQQKIAANIALSLLQLSQVPDWLTSLFSDSLISGIVANLSARNVTAEIVTLFSELMAKNYLNQEHIAGLHNLFQVCRRQAYEGGGGSKAQPSEQKAAAARCADDVRALLFGMMLEQRACSRATVEMEQQRLLREIDSFFFQESSLREQNSVK

SEQ ID NO: 186 - DNA, 3879 bp, Setaria italica
atggaacccgacggcgacacctcgccgcctcctccgccggcgccggcgccaccgcgcgcctgcggcgcgggccaccgggcgtcgcactcgctgccgacctcggcgggcggccgcgtctgcctctcctgcgccgcggcgctcctctcctccgcgggcgccgcctccacgccgtcccaccacgtcgctcacgcgctcgccagcctctccctggcgctcgccgacccggccttcctcgtgccgctccgcgccgcccacccgcgcctcctcgcggcgccgctcgccgaggcgctcgcgggcgccgccgcccgccgcgacgcggcgctcgccgcgcaggcgtccgacctcgcggccgacctcgccgccgccgtgggagcccccgccgcctcggaactcgtcgcccgcctcgcccgcgtcctctcctccggctcactcgtcaagcacctccacactctacattgtttgggggtcttgctaaacactaccaaagatggtgctgcatatataggagataaactttcgcttttcttaaatcttgttaatgacctccgactaccaagtgatgaaattcgtggagagatactcttcgtgctatacaaactctctatattaaatgccaccccatgggacaatatgtgtgataatggagatgtggatctttcagcaattggaagaaacttgcttcaactctctcttgaagtcctactcaaaactcaaaacgatgctgtccgcttgaattgtgttgcattgctccttactttagcaaagagagggccctttgacattgtgttgctcggtaatccaagttcaatcaattgcttagaagcagaacacatgcagacagattatatgtccctaaatgcttctcttgttctatttgctgaagctgtcaaaggatctctgctatctactaatctagaagttcagacagggacattgaatttgatctttcatttcctttcatctgatgcaaatatttgtgctctactccaaactttgatcaatgaaaatgttgctgattacatatttgaggttctcaggttatcaggaaagaatgatgtacttgtcatttcctctattcaagtactactacttttagccagatcagaggagaaattcaaagaaaagcttgccattggattttccaccctgcttcctgttcttcactatgttgcggagataccatttcacccggtccagtctcatgttttagaacttgtttggatctgcatggtcaattgttctggtatcctctcgctgccacaagaagaacagatagtctgtactttgactgcaatcttgagaagaaatggcaatggtgaacttggcatgagttctgagacctttattctcgtttgctcaatattgatagagattctgaagtcacctcatgctcatgatattgagaaattaccaccatttattgaagaagcatcaaaatatgctatatcttcaacattatcacatgagtatgattctatgatcctaattcctcattcccttcttcttctgaaagaagcacttctgttctgccttgaagggagcaaatataatatttctagcaagaaggatcttgaggatagcatcattgaaacttgtggaacgattttactgcattggcttgaaaatgctgtggtagatggtaatgatgatgaatcattggcagggatccttcagattttccaaattattttgtcaagggcaactgacaaaaagccattaaagtttgctgagttgctagcatcatcatcatggtttggcctgtcatttggattcatgggcttatttcctactgatcatgtaaaatcagtggtgtatttggtcactagttccattgttgacagagttttgggctgtaattatggggaagctattagagatgcacacatttatctgccatcagaccccacagaactgatgtatttgcttgggcaatgtagtacagaagacttcaacttggcatcatgccaatgcgctattctttctatactgtatgcctgctcattctacaatgaaaggcttgccgctgacaaccaaattctggcttctgttgagcaatacatcctcctcaatggtgggaacttcccacaggaaattaattgttctgtttttcttacgcttctggtccatctttatgcctttgtcagaggcatttgctgtagctgcagcattccacatagtccagaagccgagaatactctattccatgtaatgagacataaggactgggatttgcttgcaatccgagtccatccagtagcaataaaatggctctttcagaagcaagaacttatggaaccactcacattccagatgctaaatttttgcaaaactttctgtgaggatgaaactgtcatgctctcaaacagcagtcagttggtggacatacaaatggttgcagagctggtgctttctggagaaaccattgtctcatttttgctggtgtccttactaaaccagatagtaaaggagggcaccgaagatgaggtcttttcagtgatcagagttatcgctgaaatcctcatgatctctccttgttcttctgatcagtttatatcatgcggcattgtcgattcattccgttgcatatattgcttaccttactcttcaaggatcaaaacggtttgttcctatttgatctttaacaccttatgttcagcaagtgcatcgacattttctgaggaagatgaatggcttcctcttactgtgaagttattggaatttatcaattctggtattgattatacatctagtaaccaagaacgtaagatattgattgggatattatgctttgttttgcatcattcagcaaacaaagttcttgttgagcctgcaaaagccataatcttgaacagttctttggtttctttaaccgatgttatagtacacacagcatgtgcaaaaggcccatctttatttcaacacaatcaggagacagactttggagaatttatgatccttgtacttctaatggtgtttttctctctaagaagtttgcatacaattctagaggcaagtattgactggcaggacttccttcagcatccagatgatgcccaatctttttctgttcttggcattccatgccatgatttatgccgtctcatgcacttcggtccaccttctgttaaacttattgcttcacaatgcctgttggagttgctcacgagaatttcagatcaaagaacatgtactcaggctgaattaagatgctctgtgaagtatttgaagtccattattgcagtgactgagggtttggtgttcagtgaagactgtaaagttgctggaaattgcggtgcctgtctctctgtgattttaggttgggagaaatttggaagccaagagaaggtggcaactagagaatccaaatggtttcggttaataatggaggaatttgctgttgccttgacagctcctggtttgacatccaaatctttcaccaatcagcagaagtttgcagcaaatctagctgtttcattgctcaggctgagccaagtaccagattggttaacatcgctgtttgatagccatcttatatctggcattgtgactaatctttctgctaggaatgttaccgcagaaattgtcaatctcttcactgagctcatggctaggaaatatctgagtcaagagcacattgttgcactgcataacttgttccaggtgtgcagaagtcatgtctatgagggaagctccaaggcgcaaatgttggagcagaatgttaaaaaggtcgcgagaagcaccgatgacgtgcttgccttgctctttggcttgatgctgaaccagtgcacggagtctggcgtggttcaaccggagcagcagagactcctccgtgcgattgatctgtttgtccaggagtcgagcgggagagaacaacgttaa

SEQ ID NO: 187 - protein, 1292 aa, Setaria italica
MEPDGDTSPPPPPAPAPPRACGAGHRASHSLPTSAGGRVCLSCAAALLSSAGAASTPSHHVAHALASLSLALADPAFLVPLRAAHPRLLAAPLAEALAGAAARRDAALAAQASDLAADLAAAVGAPAASELVARLARVLSSGSLVKHLHTLHCLGVLLNTTKDGAAYIGDKLSLFLNLVNDLRLPSDEIRGEILFVLYKLSILNATPWDNMCDNGDVDLSAIGRNLLQLSLEVLLKTQNDAVRLNCVALLLTLAKRGPFDIVLLGNPSSINCLEAEHMQTDYMSLNASLVLFAEAVKGSLLSTNLEVQTGTLNLIFHFLSSDANICALLQTLINENVADYIFEVLRLSGKNDVLVISSIQVLLLLARSEEKFKEKLAIGFSTLLPVLHYVAEIPFHPVQSHVLELVWICMVNCSGILSLPQEEQIVCTLTAILRRNGNGELGMSSETFILVCSILIEILKSPHAHDIEKLPPFIEEASKYAISSTLSHEYDSMILIPHSLLLLKEALLFCLEGSKYNISSKKDLEDSIIETCGTILLHWLENAVVDGNDDESLAGILQIFQIILSRATDKKPLKFAELLASSSWFGLSFGFMGLFPTDHVKSVVYLVTSSIVDRVLGCNYGEAIRDAHIYLPSDPTELMYLLGQCSTEDFNLASCQCAILSILYACSFYNERLAADNQILASVEQYILLNGGNFPQEINCSVFLTLLVHLYAFVRGICCSCSIPHSPEAENTLFHVMRHKDWDLLAIRVHPVAIKWLFQKQELMEPLTFQMLNFCKTFCEDETVMLSNSSQLVDIQMVAELVLSGETIVSFLLVSLLNQIVKEGTEDEVFSVIRVIAEILMISPCSSDQFISCGIVDSFRCIYCLPYSSRIKTVCSYLIFNTLCSASASTFSEEDEWLPLTVKLLEFINSGIDYTSSNQERKILIGILCFVLHHSANKVLVEPAKAIILNSSLVSLTDVIVHTACAKGPSLFQHNQETDFGEFMILVLLMVFFSLRSLHTILEASIDWQDFLQHPDDAQSFSVLGIPCHDLCRLMHFGPPSVKLIASQCLLELLTRISDQRTCTQAELRCSVKYLKSIIAVTEGLVFSEDCKVAGNCGACLSVILGWEKFGSQEKVATRESKWFRLIMEEFAVALTAPGLTSKSFTNQQKFAANLAVSLLRLSQVPDWLTSLFDSHLISGIVTNLSARNVTAEIVNLFTELMARKYLSQEHIVALHNLFQVCRSHVYEGSSKAQMLEQNVKKVARSTDDVLALLFGLMLNQCTESGVVQPEQQRLLRAIDLFVQESSGREQR

SEQ ID NO: 188 - DNA, 3939 bp, Sorghum bicolor
atggagtccgacggcgacacgtcgccacctcgcccgcctacgccggcgccactgcgtgcctgcggcgcgggccacccggcatcgcactcgctgccgacctcggcgggcggccgcgtctgcctctcctgtgccgcggcgctcctctcctccgcgggcaccgcctccacgccatcccaccacgtcgcgcacgcgctcgccaacctctccctggcgctcgccgacccggcgttcctcaggccgctccgcgccgcgcacccacgcttcctcgcggcgccgctcgccgaggcactcgagggcgccgccgaccgccgcgatgccgcactcgccgcgcaggcgtgcgacgtcgcggccgacctcgccgccgttgtgggctcccccgctgattcagagctcgtcgcccgcctcgcccgcgtcctctcctccggctcactcgtgaagcatctccatacgctacattgtttggggcttttgctaaactctaccaaagatgctgcagcatatataggggacaaatgttctcttttcttaaaccttgttaatgatctccgacttccaagcgatgaaattcgtggagagatactctttgttctatacaaactcgctatactaaatgccaccccatgggacaatatatgtcaaattgaagatttggaccttctggcaattggtagaagcttgcttcagctctctcttgaagtcctactcaaaactcaaaatgatgctgttcgcctgaactgtattgcattgctccttactttagcaaagaaggagccctttgatcatttgctgattagcttccagagttctaacaactgcatagaagcagagtccatgcagacagattatatgtccctgaatgcttctcttgttctattcgctgaggctgtcaaaggatctctgctatctactaacctagaagttcagacagggacattggatttgatctttcatttcctgtcatctgatgcaaatatttgtgctctacttcaaattttgatcgatgaaaatgttgccgattacatatttgaggttctcaggttatcaggaaataatgatctacttgtcatttcctctattcgagtactattactttttgcgagattggaggaaaaattcaaagaaaagcttgccattggattttccactcttcttcctgttcttcactatgttgcagagataccatttcacccagtccagtcccatgttttacgacttgtttggatttgcatggtcaattgttccggtatcctctcaatgccccaagaagaacagatagcctgtactttgactgcaatcttgagaagaaatgtcaatggtgaacttgacatgagttctgaaacttttattctggtttgctcaatattaatagagattctgaagtcacctcatgctcatgatattgagaaactaccatcatttattgaagaagcatcaaaatatgcgatatcttcaacattgtcacatgagtgtgattctatgatcctcattcttcattctcttcttcttctgaaagaagcacttatattctgccttgaagggagcaaatacagtattgctagcacgaaggatcttgaggatagcatcatgggaacttgtggaactattttactgcaatggcttcaaagtgctgtggttgacggtaatgatgaagaaacattggcagagatccttcagattttccagattattttgtcaagggcatctgacaaaaagccgttaaagtttgctgaattgctagcatcatcatcatggtttagcttgtcatttggattcatgggcttatttcctactgatcgtgtaaaatcagtagtatatttggtcactagttcaattgttgacagggttttgggatgtaattatggagaaacaattcgagatgcacacatttatctaccatcagaccctacagaaatgatgtatttacttgggcaatgtagcacagaagacttcaacttggcatcatgccaatgtgctattctttctatattgtatgcctgttcattctacaatgaaaggctctgtgctaacaaccaaattctggcttctgttgagcaatacatcctcctcaatggtgggaacttcccatatgaaattaatggttctattatgcttacgcttctggtccatctttatgcctttgtcagaggcatttcctatagctgcagcattccatatagtccagaagccgagaatacactattccacttaatcatacataaggactgggatttgcttgtgacccgagtccattcggtagcaataaaatggctctttcagaaacaagaaattgtggaaccactcgccttccagatgctaaagttttgtaaaactttctgtgaagatgaaactgtcatgctctcaaacagcagtcagtcggtggacatacaaatgatttccgagcttgtactttctggagaaaccaccatctcatctttgctggtttccttgctagaccagatggtaaaggagggtacagaagatgagtttatatcatgtggtattgtcggttcattccatggcatatattgcttaccatactcttcaagcagcagaacagtttgttcctatttgatctttaacatcttacgttcagcaagtgcatcaacatttggccaggaagatgaatggcttcctcttgctctaaagttattggaatttatcacttcgggtattgactatacatctagtggccaagaacacaagatagtagttgggatactatgccttgttttgcatcattcatcaagtgaatttcttattgagcctgcaaaagccataatcttgaacagttctttggtttctttaacggatgccatagtaaacaaagcttgtgttaaaggcccatcattatttcaacacaaccaggagacaacctttggagaattcctgattcttgtacttctattggcgttcttctctctaagaagcttgcacaccattctagaggcaagtattgactggcaggacttccttcagcattcagatgatgtccagtccttttctgttctcggcattccatgccatgatttatgtcgtctcatgcactttggttcaccttctattaaacttattgcttcacaatgcctgttggagttgctcaagcgaatttcagatcaaaggtcatgtattgatgctgagttaagatgctctacgaaatatttgaagtccattattgcagtgacagagggtttgttgttcagtgaagacagtaaagttgctggaaattgcagtgcctgtctctctgtgattttaggatgggagaaatttggaagccaagagaaggtggcagtcagagaatctaaatggttcaggctaataatggaggaatttgttgtggccctgactgctcctggtttgacgtccaaatctttcaccagtcagcagaagtttgctgcaattatagctgtttcgttgctcaggctgagccaagtgccagattggctgacatcgttgtttgatgggcatctgatatctggcatcgtggctaatctttctgctaggaatgttactgcagaaatcgtcattctcttcagtgagctcatggctaggaagtatctcagtcaagagcacattgttgatctacataacttgttccaggtgtgcagaagacaggtctacgagggaagctccaaagcagcattgccagagcaaagggttgaaaaagtcgcgagaagcaccaatgacgtgctcgcatcgctctttgccctgatgaaccagtgcgcagagtccggcacggttcaagcggagcagcagagactcctgcgtgcgattgacctgttcttccaggagtctagcaggagagaacagcaatgttatgttacagctacttccccaccacagcgccaagacacaacaatgcctggggattctggaccaagacagggtcgcccaagcgtgaacacatccggctcagaatggatccggatccggcccgagtga

SEQ ID NO: 189 - protein, 1312 aa, Sorghum bicolor
MESDGDTSPPRPPTPAPLRACGAGHPASHSLPTSAGGRVCLSCAAALLSSAGTASTPSHHVAHALANLSLALADPAFLRPLRAAHPRFLAAPLAEALEGAADRRDAALAAQACDVAADLAAVVGSPADSELVARLARVLSSGSLVKHLHTLHCLGLLLNSTKDAAAYIGDKCSLFLNLVNDLRLPSDEIRGEILFVLYKLAILNATPWDNICQIEDLDLLAIGRSLLQLSLEVLLKTQNDAVRLNCIALLLTLAKKEPFDHLLISFQSSNNCIEAESMQTDYMSLNASLVLFAEAVKGSLLSTNLEVQTGTLDLIFHFLSSDANICALLQILIDENVADYIFEVLRLSGNNDLLVISSIRVLLLFARLEEKFKEKLAIGFSTLLPVLHYVAEIPFHPVQSHVLRLVWICMVNCSGILSMPQEEQIACTLTAILRRNVNGELDMSSETFILVCSILIEILKSPHAHDIEKLPSFIEEASKYAISSTLSHECDSMILILHSLLLLKEALIFCLEGSKYSIASTKDLEDSIMGTCGTILLQWLQSAVVDGNDEETLAEILQIFQIILSRASDKKPLKFAELLASSSWFSLSFGFMGLFPTDRVKSVVYLVTSSIVDRVLGCNYGETIRDAHIYLPSDPTEMMYLLGQCSTEDFNLASCQCAILSILYACSFYNERLCANNQILASVEQYILLNGGNFPYEINGSIMLTLLVHLYAFVRGISYSCSIPYSPEAENTLFHLIIHKDWDLLVTRVHSVAIKWLFQKQEIVEPLAFQMLKFCKTFCEDETVMLSNSSQSVDIQMISELVLSGETTISSLLVSLLDQMVKEGTEDEFISCGIVGSFHGIYCLPYSSSSRTVCSYLIFNILRSASASTFGQEDEWLPLALKLLEFITSGIDYTSSGQEHKIVVGILCLVLHHSSSEFLIEPAKAIILNSSLVSLTDAIVNKACVKGPSLFQHNQETTFGEFLILVLLLAFFSLRSLHTILEASIDWQDFLQHSDDVQSFSVLGIPCHDLCRLMHFGSPSIKLIASQCLLELLKRISDQRSCIDAELRCSTKYLKSIIAVTEGLLFSEDSKVAGNCSACLSVILGWEKFGSQEKVAVRESKWFRLIMEEFVVALTAPGLTSKSFTSQQKFAAIIAVSLLRLSQVPDWLTSLFDGHLISGIVANLSARNVTAEIVILFSELMARKYLSQEHIVDLHNLFQVCRRQVYEGSSKAALPEQRVEKVARSTNDVLASLFALMNQCAESGTVQAEQQRLLRAIDLFFQESSRREQQCYVTATSPPQRQDTTMPGDSGPRQGRPSVNTSGSEWIRIRPE

SEQ ID NO: 190 - DNA, 3714 bp, Vitis vinifera
atgatgttggaggaggaggaagaagaagtgtatccagcaacatgctcacagggccacagatccaccctcatcctccaaaccatggaaggaggcagaatctgcctcatctgctttaccaacctcctctccaaccctacttcccccaccttccacgtctctcacgccctctctcagctttcccacgccctctctcaccccccttttctccattcccttctctcccaccaccctcaccttctcgtctcccctcttcttcactccctctccttcttcaacgaccattccatcgcctcccagatcattcatctcgttctctttctctctaattcttctcattcttcttccctttatggggagtttgtctctcggattgcctccatcctctcaggttctaagctccactggagtccgcgccaggcctctatgcttcattgcttaggggttctcttgaactgtgagacgaataatccttatgcccacatcaaagacaaaagtgcccttgtcttcaaccttgttgcaggtcttcagttgcctagtgaagagatccagggggagatcctgtttgttctctacaaactatctatcctccaatatgcatctgaggagggtgatgggtctgaccttttattttccttttgccccaagctcttgcacttgtcaatggaagctcttatgaagacccaaagtgatgatgttcgtttgaattgtgtagcactcttgacagtgttggctcaaaggggttactttgagaatgcatttgctaatgacataagcattagggattgctgtgaagctgataacttcatggaagtgacagaacatgaaaaagatgtgcttcctctgaatatcttgtttgctgaagctatcaaaggcccactactttcttcggatagtcaacttcaacttggcgcactggatttgatcttttattatttatcatgggaaaggggttcaagcaaacggattcaagtcttggtggaagaaaacattgcagattatgtatttgaaatactaagattgtcagagtgcaaggacccagtggttaactcctgccttcgagttcttgatcttttatcaatagctgagcatgcttttggacaaagacttgctattggattcactacactgcttcctgttctgcagtatgtagttgaagttccttttcatcctgttcaaactccaacactgaagctcattaggaattgcattttgaactaccctggaatggtatccattacacaaattgaagaaataggtcttatcttgacaaggatgcttagaagacatattaatggggacgtggacatgcttccagagacgttgattattgcatgctcaatccttgtagatctcatgaagtctccttcttctcatgaggctttaactctcagaacaatagttcaagaatcagttagacatgccattttagcttctctatgcctctatgagaaacatcccaatcaaattttgcactccctttacttactgaaagaggcatatgcattcagtcatgaagggaactccactaaaaacgaagctaacctggaattaggaaattgtattattgatgtttgtagaacacatttactaccttggtttgcaacagccatcaatgaaatggaatatgaggaaattgtcttgggagtactggaagcctttcattcagtactgcttcaggattcttatgcacaagcaaaggaatttgtgatgattctggtttcatcctcttggttcagtttgtcatttggatgtttaggattatttcctagtgaaaagatgaaatggagagtatatctgatgttcagttcaattgtggatgttcttctgggaaatgaatctggacaacccattagagatgcggctttatatctaccatctgatccttctgatttgttgtttttgctgggtcagaagagcacccaaaatctagaactattgtcttgtcaatctgcagttctgctgatactatataccagctctttatatgatgaaagacttgcagatgagaagctggttttagcttctctggagcaatacattttagtcaacaacagtgatttgctatgtggagctgctgattcagtgtcaataacacgactgatgaatctttacggcttgtaccggggtcttgcaaaggtcggctatcaaattccctacagtccagaggctgagaggatcctcttcgagctagtggctcaaaatgaatgggatttgtcttctgcaactataaacttcacatcattgaaatggttgtttcagcaagagaaaatcattaagccattgtcttatcaaatactaaaattctgcagaaataatagctcaagtgggtcacacatcatcatccatggaaacgacagccaaaacatagatgtacaaggacttgcaaagttggtagcagcaggagataacttgggtgcagtgctcttggtatctttattgcaacagcttatagaggaagaaggcaatgaatgcgacatcatttcagtagtgaatctcatggtagacatcatcaacattttcccagctgcttcagaccaattatccatgcatggcataggcaatgggatccaggatcttttttcccattcgagccattctttgtcccaacagatgtttgttgccattgcaattctaatttttgacattttatggtcagtgcaacctgaaacactttctgatggtgaaacttggctttcagtgaccatgaagttaatggggtacttgatccccatggtgactgcagggggttggactcaagaaagtctcttagtactcggtattctttccttgatcttgcatcattccaccaaccaagcccttgtagaagcttcaaaagccatacttctgaatgattcccttgtctccatgatcaacaatgtgatccatacaagctgttcaaagggacctgctctaattgaagatgatgaggaaacaagaaatggagaaactttaacatttgtgcttttactacactttttctcttgtagaagttttaatgctgttctaccaggtactctggactggcaaaatctcctcgatccatcaaacaagactcagccactttccttgattagtattcactgccatgacctgtgcagactgatgcattttgggtctcctctggtcaagctggttgcttcatattgtctgatggagttgtttaccagaataacagacctgagaaacagaaaacacgatgaattaaaatggaacatggggcatctaatttctgtaatggctatattagaaggattggttttttacagtgacattagagtggctatgaactgtgccctctgcttatcaatgattctggggtgggaaaagttatggatgcaggacacaaaagtaattggaaggtgtaactggtgcaggctaattgttgaagagctggctatgtctttggcagttccttctttggcgtcaaaatcatttatgaatcatcacaaacctgcggttcatgtagctgtagcattgctgaaactgcacagcattcctgggtggatgaagtctgtgtttgatgattcctgcatttctggtataattgaaaacctttcagtcagtaatgtgagcatggagacagtgcttctgtttcgggaattactgaaccatgagtacctgaaggatgagcaaattgcctgcctaaatcgggttttccaggtgaaattttcttatcctatctcatgctctatgcactgcttttctctagtttga

SEQ ID NO: 191 - protein, 1237 aa, Vitis vinifera
MMLEEEEEEVYPATCSQGHRSTLILQTMEGGRICLICFTNLLSNPTSPTFHVSHALSQLSHALSHPPFLHSLLSHHPHLLVSPLLHSLSFFNDHSIASQIIHLVLFLSNSSHSSSLYGEFVSRIASILSGSKLHWSPRQASMLHCLGVLLNCETNNPYAHIKDKSALVFNLVAGLQLPSEEIQGEILFVLYKLSILQYASEEGDGSDLLFSFCPKLLHLSMEALMKTQSDDVRLNCVALLTVLAQRGYFENAFANDISIRDCCEADNFMEVTEHEKDVLPLNILFAEAIKGPLLSSDSQLQLGALDLIFYYLSWERGSSKRIQVLVEENIADYVFEILRLSECKDPVVNSCLRVLDLLSIAEHAFGQRLAIGFTTLLPVLQYVVEVPFHPVQTPTLKLIRNCILNYPGMVSITQIEEIGLILTRMLRRHINGDVDMLPETLIIACSILVDLMKSPSSHEALTLRTIVQESVRHAILASLCLYEKHPNQILHSLYLLKEAYAFSHEGNSTKNEANLELGNCIIDVCRTHLLPWFATAINEMEYEEIVLGVLEAFHSVLLQDSYAQAKEFVMILVSSSWFSLSFGCLGLFPSEKMKWRVYLMFSSIVDVLLGNESGQPIRDAALYLPSDPSDLLFLLGQKSTQNLELLSCQSAVLLILYTSSLYDERLADEKLVLASLEQYILVNNSDLLCGAADSVSITRLMNLYGLYRGLAKVGYQIPYSPEAERILFELVAQNEWDLSSATINFTSLKWLFQQEKIIKPLSYQILKFCRNNSSSGSHIIIHGNDSQNIDVQGLAKLVAAGDNLGAVLLVSLLQQLIEEEGNECDIISVVNLMVDIINIFPAASDQLSMHGIGNGIQDLFSHSSHSLSQQMFVAIAILIFDILWSVQPETLSDGETWLSVTMKLMGYLIPMVTAGGWTQESLLVLGILSLILHHSTNQALVEASKAILLNDSLVSMINNVIHTSCSKGPALIEDDEETRNGETLTFVLLLHFFSCRSFNAVLPGTLDWQNLLDPSNKTQPLSLISIHCHDLCRLMHFGSPLVKLVASYCLMELFTRITDLRNRKHDELKWNMGHLISVMAILEGLVFYSDIRVAMNCALCLSMILGWEKLWMQDTKVIGRCNWCRLIVEELAMSLAVPSLASKSFMNHHKPAVHVAVALLKLHSIPGWMKSVFDDSCISGIIENLSVSNVSMETVLLFRELLNHEYLKDEQIACLNRVFQVKFSYPISCSMHCFSLV

SEQ ID NO: 192 - DNA, 4224 bp, Zea mays
cttctgctacagcgataccttttgccgtaaaaagtactgcagaggaactcgttaccccatggaatccgacggcgacacgtcgccacctcgcccgcctacgccggcgccagtgcgtgcctgcggcgcgggccacccggcatcgcactcgctgccgacctcggcgggcggccgtgtctgcctctcctgtgtcgtggcgctcctctcctccgcgggcaacgcctccacgccatcccaccacgtcgcgcacgcgctggccaacctctccctggcgctcgccgacccggcattcctcaggccgctccgcgccgcgcacccacacctcctcgcggcgccgctcgccgaggcgctcgagggcgccgccgaacgccgcgatgccgcgctcgccgcgcaggcgtgcgacgtcgcggccgacctcgccgccgtcgtgggcgccccggctgattcagagctcgtcgcccgccttgcccgcgtcctctcctccggctcactcgtcaagcacctccatacgctacattgtttggggcttttgctgaactctaccaaagatgctggagcatatataggggacaaatgttctcttttcttaaatcttgttaatgatctccgacttccaagcgatgaaattcgtggagagatactctttgttctatacaaactcgctttactaaatgccaccccatgggacgatatatgtgaaactggagatttggaccttctggcaattggtagaagcttgcttcaactctctcttgaagtcctactcaaaactcaaaatgatgctgttcgcttgaactgtattgcattgctccttactttagcaaagaaggagccctttgatcatttgctgatcagcaaccagagttctaacaaatgcatagaagcagagtccatgcagacggattatatgtccctaaatgcttctcttgttctattcgctgaggctgtcaaaggatctctgctatctactaacctagaagttcaggcagggacattggatttgatctttcatttcctgtcatctgatgcaaatatttgtgctctacttcaaactttgatcgatgaaaatgttgctgattacatatttgaggttctcaggttatcagagataccatttcacccagtccagtcccatgttttacgacttgtttggatttgcatggccaattgttctggtatcctctcactgccccaagaagaacagatagcctgtactttgactgcaatcttgagaagaaatctcaatggtgaacttgacatgagttctgaaacttttattctggtttgctcaatattaatagagattctgaagtcacctcatgctcatgatattgagaaactaccatcatttattgaagaagcatcaaaatatgcgatatcttctacattgtcacatgggtatgattctacgatcctcagtactcattctcttcttcttctgaaagaagcacttatattctgccttgaagggagcaaatacaatattgctagaacgaaggatcttgaggatagcatcatgggaacttgtggaacaattttactgcaatggcttgaaagtgctgtggttgacggtaatgatgaagaaacattggctgagatccttcagattttccaaattattttgtcaagggcatctgacaaaaagccattaaaattcgctgaattgctagcatcatcatcatggctctgtgctaacaaccaaattctggcttctgttgagcaatacatcctcctcaatggtgggacctttccatatgaaatcaatggttccattatgcttacgcttctggtccatctttatgccttcatcagaggcctttcccatagctgcagcattccacacagtccagaagccgagaatacactattccacttaatcatacacaaggactgggatttgcttgtgattcgagtccattcggtagcaataaaatggctctttcagaagcaagaaattatggaaccactcgccttccagatgctaaagttttgtagaactttctgtgaagatgaaactgtcatgctttcaaacagcagtcagttggttgacatgcaaatgattgcggagcttgcactttctggagaaaccaccatctcgtctttgctggtgtccttgctagaccagatgctaaaggagggtacagaagatgagttattttcagttgtcagtgttatcgctgaaatcctcatgatctctccatgttcttccgatcaatttatatcatgtggtattatcggttcattccatggcatatattgcttaccatactcttcaaggagcagaacagtttgttcctatttgatctttaacatcttatgctcagcaaatgcatcaacatttggccaggaagatgaatggcttcctcttgttctaaagttattggaatttatcagttcgggtattgattatacctctagtggccaagaacacaagatagtagttgggatactatgccttgttttacatcattcgtcaagcaactttcttattgagcctgcaaaagccataatattgaacagttctttggtttctttaacagatgttgtagtaaacaacgcttgtgttaaaggcccatctttatttcaacacaatcaggagacaacctttggagaattcctgattcttgtacttctattggtgttcttctctctaagaagtttgcatagcattctagaggtaagtattgactggcaggacttccttcagcattcagacgatgtccagtcattttctgttctcggtattccatgccatgatttatgccgtctcatgcacttcggttcaccttctattaagcttattgcttcacaatgcctgttggagttgctcacgagaatttcagatcaaaggtcatgtaataatgctgagttaagatgctctgtgggatatttgaagtccattattgcagtgacagagggattggtgttcagtgaagacagtaaagttgctggaaattgcagtgcctgtctctctgtgattttgggatgggagaaatttggaagccaagaaaaggtggcagtcagagaatctaaatggtttaggctaataatggaggaatttgttgtggccttgactgctcctggtttgacgtcgaaatctttctccagtcagcagaagtttgctgcgaatatggctgtttcgttgctcaggctgagccaagtgccagattggctgacatcgttgtttgatgggcatctgatatctggcatcgtggctaatctttctgctaggaatgttactgcagaaatcatcaatctcttcagtgagctcatggctaggaagtatctcagtcaagagcacattgttgatctacataacttgttgcaggtgtgcagaagccaggtctacgagggaagctccaaagcaccgttgccagagcaaagggttgaaaaagtcgcgagaagcaccaatgacgtgctcgcatctctctttggcctgatggtgaaccagtgcacagactctggcacggcgcaagcggagcagcagagactactgcatgcgattgacgtgttcttccaggagtcgggcaggagacaacagcaacatgctacagctcgacaagagacagtgccaggggattatggaccaagacagggcagcagggcccgtcgccccaaagagaagatatccggtccaggatggatccggatccggcactagtgagcctacgcctacgcctgcgctcgtgaccgatgccggccgtgcccaggttgctgctggcttgtgttcggagctcccacgcttgatttgtggggaattccggcgatcagctccgccgctcccatctcacgagtcacgaactacatccgcttccaaagaaacatgatatcttgaatcctaagtcatgaatcctgagtcagaaactctagtgaagtcgcaactactcgacgtgttttaagtttttaaggagccgtaaatttagctcttgtatttaacgagctcctcgcgaaccggaatgagctgaggaagcccaaaactgatgcccacaacaagcacaaagccaacagcccaacactaacaagaccctacgtttatctcttcctattgatttcaccctgaccctgcgccaacggcttgctgccagccatggtcttgtgctaatcgcttcttgtccggttcctacccatgcttagtgtgaccctagtgttgtctgcttcgacaccaataggtaacacgaacactaaacaagcttatccatggtcatcaagcagtctattaccttccca

SEQ ID NO: 193 - protein, 1199 aa, Zea mays
MESDGDTSPPRPPTPAPVRACGAGHPASHSLPTSAGGRVCLSCVVALLSSAGNASTPSHHVAHALANLSLALADPAFLRPLRAAHPHLLAAPLAEALEGAAERRDAALAAQACDVAADLAAVVGAPADSELVARLARVLSSGSLVKHLHTLHCLGLLLNSTKDAGAYIGDKCSLFLNLVNDLRLPSDEIRGEILFVLYKLALLNATPWDDICETGDLDLLAIGRSLLQLSLEVLLKTQNDAVRLNCIALLLTLAKKEPFDHLLISNQSSNKCIEAESMQTDYMSLNASLVLFAEAVKGSLLSTNLEVQAGTLDLIFHFLSSDANICALLQTLIDENVADYIFEVLRLSEIPFHPVQSHVLRLVWICMANCSGILSLPQEEQIACTLTAILRRNLNGELDMSSETFILVCSILIEILKSPHAHDIEKLPSFIEEASKYAISSTLSHGYDSTILSTHSLLLLKEALIFCLEGSKYNIARTKDLEDSIMGTCGTILLQWLESAVVDGNDEETLAEILQIFQIILSRASDKKPLKFAELLASSSWLCANNQILASVEQYILLNGGTFPYEINGSIMLTLLVHLYAFIRGLSHSCSIPHSPEAENTLFHLIIHKDWDLLVIRVHSVAIKWLFQKQEIMEPLAFQMLKFCRTFCEDETVMLSNSSQLVDMQMIAELALSGETTISSLLVSLLDQMLKEGTEDELFSVVSVIAEILMISPCSSDQFISCGIIGSFHGIYCLPYSSRSRTVCSYLIFNILCSANASTFGQEDEWLPLVLKLLEFISSGIDYTSSGQEHKIVVGILCLVLHHSSSNFLIEPAKAIILNSSLVSLTDVVVNNACVKGPSLFQHNQETTFGEFLILVLLLVFFSLRSLHSILEVSIDWQDFLQHSDDVQSFSVLGIPCHDLCRLMHFGSPSIKLIASQCLLELLTRISDQRSCNNAELRCSVGYLKSIIAVTEGLVFSEDSKVAGNCSACLSVILGWEKFGSQEKVAVRESKWFRLIMEEFVVALTAPGLTSKSFSSQQKFAANMAVSLLRLSQVPDWLTSLFDGHLISGIVANLSARNVTAEIINLFSELMARKYLSQEHIVDLHNLLQVCRSQVYEGSSKAPLPEQRVEKVARSTNDVLASLFGLMVNQCTDSGTAQAEQQRLLHAIDVFFQESGRRQQQHATARQETVPGDYGPRQGSRARRPKEKISGPGWIRIRH

SEQ ID NO: 194 - DNA, 799 bp, Brassica napus
gaatcaaatattttcgttggtttcctgaccgtggaaaagacccaactgtaaataaaattcacaatctcaagcattcaaaatgtacacgcttacataacgtttatacacgcagagttagtttacctgttgacattacaaagacagagtaatatctactacatcaattaaaaagctagagaagaagaggtagtaagaaagaggaggcgagccaagcagtcacatggaaggagcctggcaaaagtgttgcagaagccgatctggtagggtgctgtgtggccttctgtatcctgaatcctctccttttccttatgaaaacgccaagcttcctcggtacaccgacttcatcattgacatgagctgaaaaggtatcattctgggtaggctaagattttgtccaaaatggctggctcgacctccctgaaagatgtgacttgaccaactcgtttagctaactcccctgtgactcggtccatgaaaagaagatacaacccgtttctttcttccaacgcagctactgctttcctcgtgtggacaactgatgatatccactcctcaaacacaacagtttcaaatgcttcattctctgcccacgataacaaatagtcacttatcaggaactcaattaactgtatcaatataaacatgcactcatccatctctgggaatgattcatcaaacgggtccatgaccagtaagttctcggctaaaatagatattctctgagaaatagcaaatattgcacgctgtccaatgtatggatcacttcccagtttacggatcaaatgttggacatataacc

SEQ ID NO: 195 - DNA, 1236 bp, Brassica rapa
atggagaaggagaaggaagagtcactgagactggcgatcgccgtttctctcctacgatcgaagatccagaaccgtctatcttcttcctctacttctctctgcgatgctccctccgaaaccgatcatcttcgctggaagcagaagaaccgtcgatcgtcctcctctacttctcgttgcggtgctcctccctccgaaaccgatgctcttcgatggaagcagaaggcgaaagagaggaagaaagagataatcagactccgggaagatctcaaggatgctgaaagttgtgatttgttcccagcgaatgcttcttgcaagtgttatttctttgataacttgggagaattcagcggcaggaggattggagaggcctctgagccgaggtttaacgatgctcttcgtcgtagatttctcagaataggtcttgtgctgtcatttgatttcctagcaaggataaggggaagaaggaaatcaactcgaccatctcaaagattgcggctttcagagcctgaatatgaagacgaagcagagcagctaaggatatctattgattttctcctggaactgtcccaagcggcggactccagtgttaggctttattgcttaagctattttctggtgtctaatttctgcaactggtcacatcaggctgtagatttcatattagcttcactgaagaagctgatatcgatggggagaaacttgggatctgttgaagaatctattagtttcatgattacacagttgatcgcaagaatttgcactccctttaaaggaaatgaggtgaaacaactagaaactagtgttggattttatgtccaacatttgatccgtaaactgggaagtgatccatacattggacagcgtgcaatatttgctatttctcagagaatatctattttagccgagaacttactggtcatggacccgtttgacgaatcattcccagagatggatgaatgcatgtttatattgatacagctagttgagttcttgatatgtgattatttgttaacgtgggcagagaatgaagcatttgaaactgttgtgtttgaggagtggatatcatcagttctccacgcgaggaaagcagtagctgcgttggaagaaagaaacgggttgtatcttcttttcatggaccgagtcacaggggagttagctaaacgagttggtcaagtcacatctttcagggaggtcgagccagccattttggacaaaatcttagcctaccaagaatga

SEQ ID NO: 196 - protein, 411 aa, Brassica rapa
MEKEKEESLRLAIAVSLLRSKIQNRLSSSSTSLCDAPSETDHLRWKQKNRRSSSSTSRCGAPPSETDALRWKQKAKERKKEIIRLREDLKDAESCDLFPANASCKCYFFDNLGEFSGRRIGEASEPRFNDALRRRFLRIGLVLSFDFLARIRGRRKSTRPSQRLRLSEPEYEDEAEQLRISIDFLLELSQAADSSVRLYCLSYFLVSNFCNWSHQAVDFILASLKKLISMGRNLGSVEESISFMITQLIARICTPFKGNEVKQLETSVGFYVQHLIRKLGSDPYIGQRAIFAISQRISILAENLLVMDPFDESFPEMDECMFILIQLVEFLICDYLLTWAENEAFETVVFEEWISSVLHARKAVAALEERNGLYLLFMDRVTGELAKRVGQVTSFREVEPAILDKILAYQE

SEQ ID NO: 197 - DNA, 1089 bp, Brassica rapa
atgagttcgagcttcgctgaagcaaatcagatggagaaggaagagtcgctgaaactggcgatcgctgtttctctgattcaatcgaagatccagaaccgtagatcttcttctgatgctcttcgctggaagcacaaggctaaagagaggaagaaagagataatgagactccaggaagatctcaagcatgctgaaagttgtgatttattcccagagaatgcttcttgcaagtgttacttctttgataacatgggagagttcagcgacaggcggtttggagaggcctctgaaccgagattcagtgatgttcttcgtcgtagatttatcagattagcaaggacaagggggagaaggaaatcaactcgaccatctcaaagattgcggctctcagaaccgggatatgtagaggaagcagagcatctaaagatttctattgattttctactggaacttgctgaagcagactccaattgctctaatttcagcaattggtcacatatggctgtagatttcatattagcttcactgaagaagcttatatcgatggggagaaacttggaagctgttgaagaatctattagtttcatgattacacagttgatcaaaagaatgtgcactccctttataggaaatgaggtgaaacaattagaaacaagtgccgggctttatgttcaacatctgatccgtaaactcggaagtgatccatacattggacagcgtgcaatattttctgtctctcagagactatccattttagccgaaaacttactggtcatggacccgtttgatgaatcattcccagagatggatgagtgcatgtttatattgatacagcttactgagttcctgatatgtgactatctgctaccttgggctgagagtgaagcatttgaaactgttgtgtttgaggagtggatagcatcagtaatccatgcgaggaaagcagtagctgctttggaccaaagaaacggattgtatcttctttacatggaccgagtcacaggggaactagctaaacgagttggtcaagtcacatctttccgggaggtggagccatccattttggacaaaatcttagcctacccagaatga

SEQ ID NO: 198 - protein, 362 aa, Brassica rapa
MSSSFAEANQMEKEESLKLAIAVSLIQSKIQNRRSSSDALRWKHKAKERKKEIMRLQEDLKHAESCDLFPENASCKCYFFDNMGEFSDRRFGEASEPRFSDVLRRRFIRLARTRGRRKSTRPSQRLRLSEPGYVEEAEHLKISIDFLLELAEADSNCSNFSNWSHMAVDFILASLKKLISMGRNLEAVEESISFMITQLIKRMCTPFIGNEVKQLETSAGLYVQHLIRKLGSDPYIGQRAIFSVSQRLSILAENLLVMDPFDESFPEMDECMFILIQLTEFLICDYLLPWAESEAFETVVFEEWIASVIHARKAVAALDQRNGLYLLYMDRVTGELAKRVGQVTSFREVEPSILDKILAYPE

SEQ ID NO: 199 - DNA, 1197 bp, Glycine max
atggcagagaacgaagatgcaagaaggagcgatgaatcgatgaagcttgcggtggcgatatcgcttctgagatcaaaggttttgaaaacgaaaggttcgaaacgcttccttcgttttcttctcaatctaatgctttctactcttcgctatcgtttcaccttcggattctcaggccaaggaaagaaagcaagagatcctgaggcttcgagaagatctcaaagacgctcaaggtttcgacctcattcctctctcctattaactcatgcttcgcactgcgatctcttccctgagagtgctgcttgcaagtgttatttcttcgacaatttcggagaattaagccctatgcatcatggaactggttttgacagcagattcagcgacgtccttcgacgcagatttctaagacaagtgcgatttaaggaaaggaggaaaagacattttagttataaacgaatgagtattagtgtactgtattccatactttgtgataagaactgtggcttaattgaggaggatgacacagagcagcttagggcctccgttgattttatcttggaaatctgtgactctgtatcaccggtggatgattccaagtttgcaaatctggcacatcaagctgtagactttatattggttacattgaagaattttttatctatgggaaggaacctggaacttgttgaaggaattatcaacagcctagttacacgtttgattaggcagatgtgctcgtccttgtcagaaactgggtctcaacacacgggaaccaatgctcaattttgtattcaacatttgatccgtaaacttggaagtgagccttatattggtcagcgggcaatactttcagtttgtcaaagaattttggtactagctgaacgtttgcttttctctgatccttttgatgatggctttcctaacatgcatgaaagtatgttcataatgatccagcttatcgagttcttggtgacggattacttatcagagtggtcaaaagctgaagattttgacaacttgctccttgaagattgggtgacatcaattgtccagttaagaaaagcattagaacttctggaaagcagaaatggactttatgctctctatatggaccgagtcacaggtgaattggcaaaacaacttggcggtgtctcatcgtttctgaagcttaaaccggatattattaattgtctctttcgctaa

SEQ ID NO: 200 - protein, 398 aa, Glycine max
MAENEDARRSDESMKLAVAISLLRSKVLKTKGSKRFLRFLLNLMLSTLRYRFTFGFSGQGKKARDPEASRRSQRRSRFRPHSSLLLTHASHCDLFPESAACKCYFFDNFGELSPMHHGTGFDSRFSDVLRRRFLRQVRFKERRKRHFSYKRMSISVLYSILCDKNCGLIEEDDTEQLRASVDFILEICDSVSPVDDSKFANLAHQAVDFILVTLKNFLSMGRNLELVEGIINSLVTRLIRQMCSSLSETGSQHTGTNAQFCIQHLIRKLGSEPYIGQRAILSVCQRILVLAERLLFSDPFDDGFPNMHESMFIMIQLIEFLVTDYLSEWSKAEDFDNLLLEDWVTSIVQLRKALELLESRNGLYALYMDRVTGELAKQLGGVSSFLKLKPDIINCLFR

SEQ ID NO: 201 - DNA, 1128 bp, Glycine max
atggcagagaacgaagatgcaagaaggagcgatgaatcgctgaagcttgcgttggcgatatcgcttctgcgatcaaaggttttgaaaagcgtaaaggacgaaaggttccaaacgcttccttcgttttcttctcaatctaatgcctatgccttcgactcttcgctattaaagcaagagatcctgaggctcagagaagatctcaaagacgctcaagatgcttcgcactgcgatctcttccctgagagtgctgcttgtaagtgttatttcttcgacaatttcggagaattaagccctaagcatcatggaactgcctttgacaacagatttagcgatgtccttcgacgcagatttctaagacaagtgcgatttaaggaaaggaggagaagggtaggttcttcttcttcttcaagtcagcagcggaattctttaggtttaattgaggaggatgaaacagagcagcttagggcctccgttgattttctcgtggaaatctgtgactctgtatcatcggtggatgattccaagtttgcaaatctggcacatcaagctgtggactttatattggttacattgaagaatcttttatctatgggaaggaacctggaacttgttgaaggaattatcaacagcctagttacacgtttgatcaggcagatgtgctcgtccttgtcagaaaatgggtctcaacacacgggaaccaatgctcaattttgtattcaacatttgatccgtaaacttggaagtaagccttatattggtcagcgggcaattcttgcagtttgtcaaagaattttggtactagctgagcgtttgcttttctctgatccttttgatgatggctttcctcacatgcatgaaagtatgttcataatgatccagcttatcgagttcttggtgacggattacttattagagtggtcaaaagctgaagattttgacaacatgctccttgaagattgggtgacatcaattgtccaggcaagaaaagcattagaacttctggaaagcagaaatggactatatgcgctttatatggaccgagtcacaggtgaattggcaaaacaacttggcggtgtctcatcgtttctgaagcttaaaccggatatcattaattgcctctttcgctaa

SEQ ID NO: 202 - protein, 375 aa, Glycine max
MAENEDARRSDESLKLALAISLLRSKVLKSVKDERFQTLPSFSSQSNAYAFDSSLLKQEILRLREDLKDAQDASHCDLFPESAACKCYFFDNFGELSPKHHGTAFDNRFSDVLRRRFLRQVRFKERRRRVGSSSSSSQQRNSLGLIEEDETEQLRASVDFLVEICDSVSSVDDSKFANLAHQAVDFILVTLKNLLSMGRNLELVEGIINSLVTRLIRQMCSSLSENGSQHTGTNAQFCIQHLIRKLGSKPYIGQRAILAVCQRILVLAERLLFSDPFDDGFPHMHESMFIMIQLIEFLVTDYLLEWSKAEDFDNMLLEDWVTSIVQARKALELLESRNGLYALYMDRVTGELAKQLGGVSSFLKLKPDIINCLFR

SEQ ID NO: 203 - DNA, 1398 bp, Medicago truncatula
atgacggaggttggaaatgccgcaacgagtgatgaatctatgaaacttgccgtagcgatttcacttctccgttctaagtttatcaaaaacactaaacactcctccaatgctatctctccttctcaatcggaaaatcttctccgttggaaacgaaaggctaaggaaaggaagcaagagattctacgcctcaaagaagatctgaaagaaactcaagatgcttcgcactgtgatctatttcctgagagtgcttcttgcaagtgctatttctttgataatttagggaaattaagtcctaagcatgatcgaaatgattcgaataacagattcaatgacgtgcttcgccgaagatttctaagacaagtgagatttaaggaaaggaggagaagaattggatcttcatcttcttcaactcagcaacggctttctttaggtttagttgaggaggatgaaacggagcagcttaaggcgtctgttgattttcttatggagctgtgtgagactgtatcacctgtggatgattcaaagtttgcaaacttggcacaccaatccgttgaatttatattgggttcattgaagaatcttctgtctagaggaaggaacctggaacttgttgaacgaactatcaacagcttagttacacgtttgactgtgaagatgtgctcatacttgtcagaaaatggatctcaagacagtggcaccaatgcacagttctgtattcagcatttggtccgtaaacttggaagtgcgccctatattggccaacgggttatactttcagtttgtcaaagaattttggtgttagcagaacgtttgcttttctctgatccttttgatgaaaaatttcctgacatgcacgaatgtatgttcatcatgatccagcttattgagtttttggtggcagattacttactagagtggtcaaaagctgaagattttgacaccatgctccttgaagattggatgacagcaattattcaggcaagaaaagcattagaacttctggaaagcagaaatggactattcgcgctttatatggaccgtgtcacaggtgaattggcaaagcatgtcggtggagtctcattgcttcagaagtggcggagccagactaaaaagtttgggatggccgagaccaaaattgatttttcgactctttcaatcttcttggaaaacgaattgatttttcgactcttcatgttgcaaagaaacaaattttatcaaaatgatactcataattatagtatgttgtatcttgtaacaacaaattcaaataaaatcagagaaccaacattgttacaaggactgaggtacaaattgatgattgaatacaaagacacagtaggtagaactagaagatactatatagtgacaggtcaatatctgaatgaagaagtaatttag

SEQ ID NO: 204 - protein, 465 aa, Medicago truncatula
MTEVGNAATSDESMKLAVAISLLRSKFIKNTKHSSNAISPSQSENLLRWKRKAKERKQEILRLKEDLKETQDASHCDLFPESASCKCYFFDNLGKLSPKHDRNDSNNRFNDVLRRRFLRQVRFKERRRRIGSSSSSTQQRLSLGLVEEDETEQLKASVDFLMELCETVSPVDDSKFANLAHQSVEFILGSLKNLLSRGRNLELVERTINSLVTRLTVKMCSYLSENGSQDSGTNAQFCIQHLVRKLGSAPYIGQRVILSVCQRILVLAERLLFSDPFDEKFPDMHECMFIMIQLIEFLVADYLLEWSKAEDFDTMLLEDWMTAIIQARKALELLESRNGLFALYMDRVTGELAKHVGGVSLLQKWRSQTKKFGMAETKIDFSTLSIFLENELIFRLFMLQRNKFYQNDTHNYSMLYLVTTNSNKIREPTLLQGLRYKLMIEYKDTVGRTRRYYIVTGQYLNEEVI

SEQ ID NO: 205 - DNA, 1107 bp, Oryza sativa
atggctcctcccgcctcccgcccgccgacgccgacgccgacgccgacggcgaatgcggcggcctcctcgtcgcggatagagtcgccgtcgctcagggcggccctcgccatggctctcatccactacaaccgcctcccctctcgagcagcagcagccgctgccccctctccccaggctctcctcaactggaagcgcaaggccaaggaccggaagcgcgagatcctccgcctccgcgaggagctcaagctcctccaagacggggcgcgcggggaggagatggagccgccggtcgcgtcgtgccgatgccacttcttcgacgggtgcggggaccttccaccgccgacggacggcgatgctggggagcactgggtcgacgacgtgctgcggaggagattcgtcagattggaatataacactgaggatgaggtacaacagcttagcttgtcgattgatttcctggtggagttatcagatggcttgtttgccaaaagagaagctggctcctcatttactacattttctcaccaggcagtagacttcattctggcttcactgaagaacattctctcgtcagaaagggaaaaggagataatcgaggagataatcaatggtttggttgcacgtttgatgaaaaggatgtgcaccactcctgaaaatgctggatcagttgactgttcagatgcccaattctccctgcagcacttattccgtaagttaggaaatgaggagtttgttggtcagaggataatccttgcaatttctcaaaagatctcaaatgtatcagaaaaattacttctggcagatccatttgatgatggtttccctgaaatgcatagcaatatgtttattatgatacaattaatcgagttcctaatatctgacagcttcaacaattggctatgccgtgatcattttgacagaaaactttttgaagaatgggtcagatctattctcaaggcacgaaaggacttggaagtcctagatgggagaaacggactgtatgtggtatacattgagcgagtgattggaagattggcaagggaggtagctcctgctgctcatcaggggaagctggacctagaagtcctctccaaactcctttactga

SEQ ID NO: 206 - protein, 368 aa, Oryza sativa
MAPPASRPPTPTPTPTANAAASSSRIESPSLRAALAMALIHYNRLPSRAAAAAAPSPQALLNWKRKAKDRKREILRLREELKLLQDGARGEEMEPPVASCRCHFFDGCGDLPPPTDGDAGEHWVDDVLRRRFVRLEYNTEDEVQQLSLSIDFLVELSDGLFAKREAGSSFTTFSHQAVDFILASLKNILSSEREKEIIEEIINGLVARLMKRMCTTPENAGSVDCSDAQFSLQHLFRKLGNEEFVGQRIILAISQKISNVSEKLLLADPFDDGFPEMHSNMFIMIQLIEFLISDSFNNWLCRDHFDRKLFEEWVRSILKARKDLEVLDGRNGLYVVYIERVIGRLAREVAPAAHQGKLDLEVLSKLLY

SEQ ID NO: 207 - DNA, 1017 bp, Setaria italica
atgggtcctcctgccccctcccgcccgccaacgccgacggcttcagcggcgacggccacctcttcgtcgcggatagactcgccgtctctgaaggccgcgctcgctatggctctcatccactacaaccgcctccccggcaaagccgccgccaccgcctccgccgccgcgggcacatccacatcatccgcgcctttcctccactggaagcgcaaggccaaggaccgaaagcgcgaaatcctccgcctccgcgaggagctcaagctcctccaagatggggcgcgcggggaggagatggaaccgccggtcgcctcgtgccggtgccatttcttcgacgggtgcggggacctgctgccacagccgggcggcggcggtggggagcactgggtcgacgaggtgctgaggaggaggttcctcagactggtgcggtggaaggagaagagacgccgagtagatcgaccacttccaaggagtagtttgattgatctcaacagtgaggatgagatgcagcagcttagcatgtcgactgatttcctggtggagctatcagacggcctttttgccaaaagagaagctgccccctcatttgttacattttctcaccaagcagtggatttcattctggcttcactgaagaacattctatcatcagaaagggagaaggagctagttggggagataatcgatggtttagtgtctcgtttgatgaaaaggatgtgcactgttcctgaaaatgctggtacttcagattcaggatcagttgactgctcagatgcccagttctctgtgcagcacttgttccgtaagttagggaatgaggagtttattggtcagcggataatccttgcagtttctcaaaagatctcgaatgcatcagaaaggttacttctggttgatccttttgatgatgctttccctgatatccatggcaatatattcatcatgattcagttaatcgagttcctaataactgattacatgaaagattggctttgctgcgagcattttgacaaaagttag

SEQ ID NO: 208 - protein, 338 aa, Setaria italica
MGPPAPSRPPTPTASAATATSSSRIDSPSLKAALAMALIHYNRLPGKAAATASAAAGTSTSSAPFLHWKRKAKDRKREILRLREELKLLQDGARGEEMEPPVASCRCHFFDGCGDLLPQPGGGGGEHWVDEVLRRRFLRLVRWKEKRRRVDRPLPRSSLIDLNSEDEMQQLSMSTDFLVELSDGLFAKREAAPSFVTFSHQAVDFILASLKNILSSEREKELVGEIIDGLVSRLMKRMCTVPENAGTSDSGSVDCSDAQFSVQHLFRKLGNEEFIGQRIILAVSQKISNASERLLLVDPFDDAFPDIHGNIFIMIQLIEFLITDYMKDWLCCEHFDKS

SEQ ID NO: 209 - DNA, 1023 bp, Sorghum bicolor
atggctcctcctcctcccaactcccgcctgccaacgccgacggcgtcagcggctacgggcacctcctcgtcgcgaatagactcgccgtcgctaaaggccgcgctcgcaatggctctcatccactacaaccgcctgcccggcaaagccaacgccaccgtcaccgccaccgccgcctccgcaggcacatcgcccccgcctcttatccactggaagcgcaaggccaaggaccggaagcgcgaaatcctccgcctccgcgaagagctcaagctcctccaagatggggcgcgcggggaggagatggagcccccggttgcgtcgtgccggtgccacttcttcgacgggtgcggggaccttccaccgcagcagggtggcggtggtggggagcattgggttgacgaggtgctgaggaggaggtttctcagactcgtgcggtggaaggagaaacgacggcgagtggatcggcctcttccaagttgtagtttgattgatttcaacagtgaggatgagatgcagcagctcagcatgtcgattgatttcctggtggagctatcagacggcatttttgccaaaagagaagctggcccctcatttgctacattttctcaccaagcagtagatttcattttggctacactgaagaacattctttcatcagaaagggaaaaggagctagttggggagataatcgatggtttagtgactcgtttgatgaaaaggatgtgcaccgttcttgaaaatcctggtacttcagattcaggatcaactggctgctcagatgcccagttctctgtgcagcatttattccgtaagttgggaaatgatgaattcattggtcagcgggtaatccttgcagtttctcaaaagatctcaaatgtatctgaaagattgctcttgatcgatccgtttgatgatgctttccctgatatgcatgacaatatattcatcatgattcagttactcgagttcctcatatctgattacatgaaagtttggctatgctgcgagcatattgacaaaagttag

SEQ ID NO: 210 - protein, 340 aa, Sorghum bicolor
MAPPPPNSRLPTPTASAATGTSSSRIDSPSLKAALAMALIHYNRLPGKANATVTATAASAGTSPPPLIHWKRKAKDRKREILRLREELKLLQDGARGEEMEPPVASCRCHFFDGCGDLPPQQGGGGGEHWVDEVLRRRFLRLVRWKEKRRRVDRPLPSCSLIDFNSEDEMQQLSMSIDFLVELSDGIFAKREAGPSFATFSHQAVDFILATLKNILSSEREKELVGEIIDGLVTRLMKRMCTVLENPGTSDSGSTGCSDAQFSVQHLFRKLGNDEFIGQRVILAVSQKISNVSERLLLIDPFDDAFPDMHDNIFIMIQLLEFLISDYMKVWLCCEHIDKS

SEQ ID NO: 211 - DNA, 1104 bp, Vitis vinifera
atgtcgacgtcgaacaccgactctcatcaatccttgaaattggccgttgccatggctctcctccgttctaagctcctccacaacaccaaccctcctcctccacattccgacgctcttcgttggaagcgaaaggccaaggagagaaaacaagagcttcttaggctcaaggaagatctcagggaagccgaagatggtttacgacatgatctcttcccgccaagcgcttcttgcaagtgccatttcttcgatgatttggggaaattgagccccaatcagttcgaacgtggctctaatcgcaacttcaatgatgttcttcgccggagatttctcagacaagtgcggttgaaggaacgaaggagaaaaagaacggatgattcaatcaaacataaccattattcagatatagtctgcgaggatgaaacagaacaacttagggcctcaattgattttctggtggagctttgcgacactgcttctcctgtcagtgtggagaacagtaacttcacaaactggtcacaccaagctgttgactttattttagcttcattgaagaatctgctatcagtgagaaagaatgtggaatacattaaaggaattatcaacagcttaattaagcatttggtcagaaggttgtgtacgcccttaaaaggagatgagttacatcatttggatgctgatcaccagttctatgtccagcacttgatccgcaagcttggaagtgatccctttgttggacaccgggcaatactctcagtttctcaaagaatttctttgatagctgaaagtttgcttttcttggatccttttgatgatgcttttccaaatttgcatggttgtatgtttgtgctgatccagcttattgaatttctgatatcagactacttcttggtttggtcaagagatgaaggttttgacaacatgctgtttgtcgagtgggtgacatcaattcttcatgcacggaaagcattagaactcttggaaagcaggaatgggctttatgttctatacatggatagggtgactggggagttggctaaacatgtgggtcaggtttcactactccaggagctcaaccctgatattattaatatcctgttccattga

SEQ ID NO: 212 - protein, 367 aa, Vitis vinifera
MSTSNTDSHQSLKLAVAMALLRSKLLHNTNPPPPHSDALRWKRKAKERKQELLRLKEDLREAEDGLRHDLFPPSASCKCHFFDDLGKLSPNQFERGSNRNFNDVLRRRFLRQVRLKERRRKRTDDSIKHNHYSDIVCEDETEQLRASIDFLVELCDTASPVSVENSNFTNWSHQAVDFILASLKNLLSVRKNVEYIKGIINSLIKHLVRRLCTPLKGDELHHLDADHQFYVQHLIRKLGSDPFVGHRAILSVSQRISLIAESLLFLDPFDDAFPNLHGCMFVLIQLIEFLISDYFLVWSRDEGFDNMLFVEWVTSILHARKALELLESRNGLYVLYMDRVTGELAKHVGQVSLLQELNPDIINILFH

SEQ ID NO: 213 - DNA, 1656 bp, Zea mays
ttaaattcgttgatcacggatcacggtccacatattcttgggtgggcctctcctctcgtttgcctgcgccgccgcgatcgccaatcggcatggctcttcccaaaccccgcccgccaacgccgacggcgtcagcggccacgggcacctcctcgtcgcgaatagactcgccatcgctaaaggccgcgctcgcaatggctctcatccactacaaccgcctccctggcaaagccaacgccaccgcgggcacatcacccccgtctctcctccactggaagcgcaaggccaaggaccggaagcgcgaaatcctccgcctccgcgaggagctcaaggtcctccaagatggggtgcgcggggaggagatggagcccccggttgcgtcgtgccggtgccacttcttcgacgggtgccgggaccttcgaccgcagcagggtggcggtggtggggagcactgggttgacgaggtgctgaggaggaggtttctcagactggtgcggtggaaggagaagcgacggcgagtggatcgatctcttccaagttctagtttgatcgatttcaacagtgaggatgagatgcagcagctcagcatgtcgactgatttcctggtggagctatcagacggcatttttgccaaaagtgaagctggccactcatttgctacattttctcaccaagcagtagatttcattttggctacactgaagaacattctttcatcggaaagggaaaaagacttagttggggagataatcgatagtttagtgactcgtttgatgaaaaggatgtgcactgttcctgaaaagcttgtcacatcagattcaggatcaactggctgctcagatgcccagttctcagtgcagcacttattccgtaagttgggaaatgatgaattcattggtcagcgggtaatccttgtagtttctcaaaagatatccaacgtatctgaaagattgttcttggctgatccgtttgctgatgctttccctgatatgcatgacaatatattcatcatgattcagttacttgagttcctcatatctgattacatgaaagtttggctatgctgtgagcatattaacaaaagactttttgaagaatgtaccagatctattctcaaggcacgcaatgatttgcaaatcctggaaaacatgaatgggctctatgtggtgtacattgagcgtgtggtcggaaggttggcaagggatgtggctcctgctgcacatcaggggaagctggacctagaagttttctccaaactgctgtgctgagagtgccttgcatatgacattccaagcctgacccggcctgttatatgcttaggttgattcaaaaccacgacaccattggtccacttagactatgcatagttacatttctgtttgaaagacaaactttagaatttggtagtggatctacttgtatggcctgttgtttcatgtcaccattgatagttgattagtttcattttgctgacttaacccctatacactgtgagttgctgtagacatgctttgttactctgcaaatttaggttgcatccgtgaataatagtaacttctgcgcgccctgcgcgcacaaaaaacgttacacaatatgtagtgtaaatgacatatttatacttagttatatatgctaatgcggtgaatttggcttggactt

SEQ ID NO: 214 - protein, 391 aa, Zea mays
MALPKPRPPTPTASAATGTSSSRIDSPSLKAALAMALIHYNRLPGKANATAGTSPPSLLHWKRKAKDRKREILRLREELKVLQDGVRGEEMEPPVASCRCHFFDGCRDLRPQQGGGGGEHWVDEVLRRRFLRLVRWKEKRRRVDRSLPSSSLIDFNSEDEMQQLSMSTDFLVELSDGIFAKSEAGHSFATFSHQAVDFILATLKNILSSEREKDLVGEIIDSLVTRLMKRMCTVPEKLVTSDSGSTGCSDAQFSVQHLFRKLGNDEFIGQRVILVVSQKISNVSERLFLADPFADAFPDMHDNIFIMIQLLEFLISDYMKVWLCCEHINKRLFEECTRSILKARNDLQILENMNGLYVVYIERVVGRLARDVAPAAHQGKLDLEVFSKLLC

SEQ ID NO: 215 - DNA, 672 bp, Brassica napus
gactctccactctagtctcagatatttttttctctctacttcaaaaattccgtttagagacttctctccctcttctctaatttgaaatatcgttgaagaagagctgcgatctacgatgaagatgaacaaagcctttgatctgaaatcgatttcggtgtttcctcctaatttaagaaggagatcgagcgttggaccctccgagccacaagcatcgcagcagtccttatcgcagggaccttcctctcagcgaggctgtttttctcagctgactcagagctctgtcgatcagctctatgatcagagatttacttgtcaggaacgagatctctctttgaagaagaatagtttcttggccccggttaatcataaacgagacgatattcagatgcgttcatctcgaccttccagcggaagatggagttctgtttcccttgcagaatctaaatctcagattagtgaagaacgctttgggatgatggaaacttcgttgagcaagtttggaatgatgctggattccattcagactgacatcattcaagccaaccgaggaaccaagcaagtatttctcgaaagttagttctatgtttgatctcattttcagtattttatcaacctgcacttcacatgaataacgtctcaatagatagctggcttttatagtttctatgtgtg

SEQ ID NO: 216 - DNA, 1200 bp, Brassica rapa
atgaagatgaacaaagcctttgatctgaaatcgatttcggtgtttcctcctaatttaagaaggagatcgagcgttggaccctccgaaccgcaagcatcgcagcagtccttatcgcagggaccttcctctcagcgaggctgtttttctcagatgactcagagctctgtcgatcagagatttacttgtcaggaacgagatctctctttgaagaagactagtttcttggccccggttaatcataaacgagacgatactcagatgctttcatctcgaccttccagcggaagatggagttctgtttcctttgcagaatctaaatctcagattagtgaagaacgctttgggatgatggaaacttcgttgagcaagtttggaatgatgctggattcctttcagactgacatcattcaagccaaccgaggaaccaagcaagtatttctcgaaactgaacgcctacaccaaaagttgcttctccaagacacttcccttcagcagctaataaaggaacaaacagatgttaaagccagtcttgatggagctgttaaatctgttctggaggaactaaccaaatttcctaatcaagagaagcttcagaaaatagctctgatgttaacagctatcccggagcaagtagaaacctctctgcagaaaatacaaagcgaaatctgccacaagcttaccggagatattcaggttttggctagcttgaagatgactgagccagtaatagctcaggaggttccaacagcaccacaagtgaagaagtctaaggaaaacttgcatgagcagcgtggtccagcagccaagctacagagcagtgccttttgtgatgctatactgaaaacgaaacaacctcggcttcatagaaatccagataagacatcagcgaggaatgtaaaaacatttttatccccaaagacacaagtgggatgttggaagacggtgaaaccagcacaaagaacgtcaaagaataacacagcaagaaagcaagtgaaacctgtaggcactcgtacgcagtttgaggaatgcagcattgtcatagactcagatgaagatatagatgaaggcttttcatgcttgctgaaagggaacaccaaaggagctagcttcgaatgggatgcaaagaaggaaacggaaaggctgctgaagacagcgaggaggacaaggaggaagttcggtaaccccataataataaactga

SEQ ID NO: 217 - protein, 399 aa, Brassica rapa
MKMNKAFDLKSISVFPPNLRRRSSVGPSEPQASQQSLSQGPSSQRGCFSQMTQSSVDQRFTCQERDLSLKKTSFLAPVNHKRDDTQMLSSRPSSGRWSSVSFAESKSQISEERFGMMETSLSKFGMMLDSFQTDIIQANRGTKQVFLETERLHQKLLLQDTSLQQLIKEQTDVKASLDGAVKSVLEELTKFPNQEKLQKIALMLTAIPEQVETSLQKIQSEICHKLTGDIQVLASLKMTEPVIAQEVPTAPQVKKSKENLHEQRGPAAKLQSSAFCDAILKTKQPRLHRNPDKTSARNVKTFLSPKTQVGCWKTVKPAQRTSKNNTARKQVKPVGTRTQFEECSIVIDSDEDIDEGFSCLLKGNTKGASFEWDAKKETERLLKTARRTRRKFGNPIIIN

SEQ ID NO: 218 - DNA, 1854 bp, Brassica rapa
atgaatatcaacaaagcctgcgatctgaaatcaatatccgtgtttcctcctaatctaaggggatcgagtattggaccgttggaaccacaggcatcgcgatcacagcagtcgcagcagcttcgatctcagcagtcacagcagtcgttctcgcagggaccttcgtcttactctcagcgtggttgtttttctcagaggactcagggctcggttgatgaactcgtgataagcgatcagagatttagttcccaagaacgagatcactctttgaagaaggttaattgcttgcccccaattagtcatagaagagatgatagtcagcttgttgcgtatagatcttctagcggtcttcagagaagatggagttctgactcagtcggagagtctaaatctcaactcagtgaagaatttgagcaacggtttagggtgatggaaacttcactgagcaagtttgggatgatgttggattcaattcagagtgacatcatgcaagccaacagaggaactaaagaagtattacttataactgaacgcatacagcaaaagttgattctccaagacacttcacttcagcagctgataaaggaacaagcaaattttaaagctagtcttgatggaggtgttaaatcgatattggaggaactaagcaaagatttcagtgaagagaagctacaaagtataaccctgatgctaaaggctatcccagaacaagtagaatccgctctgcagaaaatgcaaagggaaatctaccacacgttcaccagagagtctcaggctttgtctagcttggagatggctgaggtaatatttcaggctccagcagcaccacaagtgaaggctaaggaaaacctgcctgaacatcggggtccatcagcgaaggttttgcctatcatgaagaagcctgagccaatagatcgtcttccaagagcaccacaactgaagccaaacatttcagcaattaatatgacttttgttcaacagcagtcaaaggaaaactttcctgagcagcgtggagcagaagccaagagaaatgctatttctaatgctacaccgaaaaggaaaaaaccatcatctagaaccgtaaagacatctttatccccaaagatacaagttggaggctggaagacagtgaaaccagaacaaaacacattcaagaagagcgcagcaagaaagcaagtaaaaccagaagacactcgtacacagtttcaacaaggttgtattgtgatagactcagatgaagatatagacggaggcttttcatgtatgctcaacgggaacgccaaaggtatgaacaaagaatctctaaaacttgatttctctggaagcaatggagaacttgttgtgtttgtaagatctgagatgggcgagccgctaggactgctccaggtgactgttattcgaggaaagaaactggttatcagagacttcaagtcaagtgatccttacgtgattgtcaaactgggaactgagtcagccaagaccaaagtgatcaacaactgcttgaatcctgtgtgggatgaggaactgagctttacactcaaagaccctgcagcagttctctcattggaagtgtttgataaagataggttcaaggcagatgacaagatgggtcatgccactctcagccttcaaccgctcatctcagtagccaggctaaggcatatagtgcgtgtctcctctggcgagacaactcttaggaaagtgttacctgattctgacaactgtgtatctcgggagagcacaatcagctgcatagacggagaggtggtgcagagcgtgtggctgaagctgtgcgctgttgaatcgggtgagattgagttgaagatcaagttgatcgatcgtcctggaacaaagtag

SEQ ID NO: 219 - protein, 617 aa, Brassica rapa
MNINKACDLKSISVFPPNLRGSSIGPLEPQASRSQQSQQLRSQQSQQSFSQGPSSYSQRGCFSQRTQGSVDELVISDQRFSSQERDHSLKKVNCLPPISHRRDDSQLVAYRSSSGLQRRWSSDSVGESKSQLSEEFEQRFRVMETSLSKFGMMLDSIQSDIMQANRGTKEVLLITERIQQKLILQDTSLQQLIKEQANFKASLDGGVKSILEELSKDFSEEKLQSITLMLKAIPEQVESALQKMQREIYHTFTRESQALSSLEMAEVIFQAPAAPQVKAKENLPEHRGPSAKVLPIMKKPEPIDRLPRAPQLKPNISAINMTFVQQQSKENFPEQRGAEAKRNAISNATPKRKKPSSRTVKTSLSPKIQVGGWKTVKPEQNTFKKSAARKQVKPEDTRTQFQQGCIVIDSDEDIDGGFSCMLNGNAKGMNKESLKLDFSGSNGELVVFVRSEMGEPLGLLQVTVIRGKKLVIRDFKSSDPYVIVKLGTESAKTKVINNCLNPVWDEELSFTLKDPAAVLSLEVFDKDRFKADDKMGHATLSLQPLISVARLRHIVRVSSGETTLRKVLPDSDNCVSRESTISCIDGEVVQSVWLKLCAVESGEIELKIKLIDRPGTK

SEQ ID NO: 220 - DNA, 615 bp, Glycine max
agagttggttctcaagaacatgaaaactctttgaggaggatgtctagcttctcccgacctacatattcacgggaagagagtcaagcacctaactcaagatcttcgtccaatctaatgctcaaatggcattctgctgatcataaaagtcagttaagtgaaggacttgaacaccgaattggcataatggaaacttcattgggcagattcacaatgatcttggattctgttcaaagtgatgtaatgcaagtaaacaaaggaacaaaggaaattactttggaggtggaatgcataaggcagaagttgattgctcaggataactcacttcagttaatgactaaaggacaagaagaaattaaagcaatcattgaagggagcctgaaatctttagctgaacaaatgagccatgtttcaaagaaagagaagttacgggaagtatatttggcggtttctgcgttgcctcagctaattgaagcctctctgcaaaacgtacaaaatgatctccgtaacatcaccaaggaaatgcaggcacttacccagatgactcgtcaaccaaaaggatctggcgccgaccactttgtcttcaaaggtgctttatctctattaatgaaccattaa

SEQ ID NO: 221 - protein, 204 aa, Glycine max
RVGSQEHENSLRRMSSFSRPTYSREESQAPNSRSSSNLMLKWHSADHKSQLSEGLEHRIGIMETSLGRFTMILDSVQSDVMQVNKGTKEITLEVECIRQKLIAQDNSLQLMTKGQEEIKAIIEGSLKSLAEQMSHVSKKEKLREVYLAVSALPQLIEASLQNVQNDLRNITKEMQALTQMTRQPKGSGADHFVFKGALSLLMNH

SEQ ID NO: 222 - DNA, 529 bp, Glycine max
agagttggttctcaagaacatgagaactctttgaggaggatttctagcttgtcccgacctacatattcacgggaagagagtcaagcacctaactcaagatcttcatccaatctaatgctcaaatggaattctgcagatcataaaagtcagttaagtgaaggacttgaacaccgaattggcataatggaaacttcattgagcaggttcacaatgatcttggattctgttcaaagtgacgtaatgcaagtaaacaaaggaacaaaggaaattattttggaggtggaatgcataaggcagaagttgattgctcaggataactcacttcagttaatgactaaaggacaagaagaaattaaagcaatcattgaaaggagcttgaaatctttagctgaacaaatgagccatgtttcaaagaaagagaagttacaggatgtatatttggcagtttctgcgttacctcagctaattgaagcctctctgcaaaatgtacaaaatgatctccgtaacatcaccaaggaaatgcaggcac

SEQ ID NO: 223 - protein, 176 aa, Glycine max
RVGSQEHENSLRRISSLSRPTYSREESQAPNSRSSSNLMLKWNSADHKSQLSEGLEHRIGIMETSLSRFTMILDSVQSDVMQVNKGTKEIILEVECIRQKLIAQDNSLQLMTKGQEEIKAIIERSLKSLAEQMSHVSKKEKLQDVYLAVSALPQLIEASLQNVQNDLRNITKEMQA

SEQ ID NO: 224 - DNA, 1359 bp, Medicago truncatula
atgaagatcaacaaagcctccgatctctcctccatctccgtcttccctcctcctcacgtttattccaggaagatgaacaatgcatccaatggatttcaagcctcgcaacatcgatcgcaaccgtcgcatcgagatatagagaggcagaacaatgtatcgaatggattgcatgcgatgtcgcaacatcgatcacaaccgtctcagcagtcattttctcagggactttcatctcagcaaggaattttgtctcatttctctcagagttctcttgatgaagctatcacaacaaatgaccagagagctgcttctcaagaacttgagaactcttcaaggaggttttctagtttgccccgccttacttattcaaaggacgagagtcaaccccacaactcaagatcttcatcaaatctcctggtcaaatggaactctgcagataataaaaatcagttaagtgaaggactcgaaaacagaattggcataatggaaacctcattgagcaggtttgcaatgatcatggattctgttcaaagtgacgtaatgcaagtaaacaaaggaacaaaggaaatgcacttggagatggagtgcataagacaaaagttgattgctcaggataacacacttcagttaatgatgaaaggacaagaagaaattaaagcaagcatcaatgggagtttgaaatctttatctgaacaaatgagccgtgttacagacatagagaagttacaggaagaaatctcttgcagtttaaaacattctaaccaaaaggatctggcacagcctattctatctccaaagtgtgttagcaaacaagttatcacaccgaaaatgcgtcagactccagccgtctggtttatggccaagggtcacatgtatttttctcttgaattcagtgaagcgaagaagaacactccagttattgtagcttcagaagcagacacaggaggctggaggccagtaaaaagagaaagagtcactttttcagatagaatatctgagaaggttcaaaagcgaattccaccaaaagtggagaagggtataaggggaggaagagactatgcaattgtcattgaatctgacgaggagtctgattgctttgaagtaaaatcaggaaagtgggaagggaagaaaaaagaaaaaattacaaatgaggcaagtaacatcagccaaatggagggagctaagttggttacaacagatggacatgcagcggttaggaggagtgcaaggaagagactccctaaccaaatgatggatgattttgtgtgcaaaggacttgtttggaaatttgaccaaggaagaagaggaagaaaccgagagaattttgaggaatgcaaggaggcacaagaggaagcaacgtaa

SEQ ID NO: 225 - protein, 452 aa, Medicago truncatula
MKINKASDLSSISVFPPPHVYSRKMNNASNGFQASQHRSQPSHRDIERQNNVSNGLHAMSQHRSQPSQQSFSQGLSSQQGILSHFSQSSLDEAITTNDQRAASQELENSSRRFSSLPRLTYSKDESQPHNSRSSSNLLVKWNSADNKNQLSEGLENRIGIMETSLSRFAMIMDSVQSDVMQVNKGTKEMHLEMECIRQKLIAQDNTLQLMMKGQEEIKASINGSLKSLSEQMSRVTDIEKLQEEISCSLKHSNQKDLAQPILSPKCVSKQVITPKMRQTPAVWFMAKGHMYFSLEFSEAKKNTPVIVASEADTGGWRPVKRERVTFSDRISEKVQKRIPPKVEKGIRGGRDYAIVIESDEESDCFEVKSGKWEGKKKEKITNEASNISQMEGAKLVTTDGHAAVRRSARKRLPNQMMDDFVCKGLVWKFDQGRRGRNRENFEECKEAQEEAT

SEQ ID NO: 226 - DNA, 1879 bp, Oryza sativa
gcaggaagaaattcaaatttgcgaatattctctctctctccccggcgaaggcgacggcgaaggagaaggctacggcgatcggcggcgatcggcggcatgaagcttaagatgaacaaggcctgcgacatcgcctccatctccgtcctccctccccggaggaccggagggagcagcggcgcgtcggcttccggttccgtggcggtggcggtggcgtctcagccgcggtcgcagccgctctcgcagtcgcagcagtccttctcgcagggcgcctccgcctcgctcttgcactcgcagtcgcagttctcgcaggtctccctcgacgacaacctcctcaccctcctcccttcccccacccgcgatcagagatttggcttgcatgatgactcatccaagaggatgtcctctttaccagccagttcagcttcttgcgcgcgagaagagtctcagctgcaactggcaaaattaccaagcaacccagtgcaccgctggaacccctccattgcagatactagatcaggtcaggttactaatgaggatgttgagcgcaaatttcagcatctggcaagctcagtacataagatggggatggtggtagactcagtccaaagtgacgtaatgcagttaaacagagccatgaaggaggcatcattagattctggtagcatacggcaaaagattgctgtccttgaaagctcacttcagcaaattcttaagggacaagacgatctcaaagcactctttggaagcagcacaaaacacaatcctgatcagacaagtgttctgaattctctaggcagcaaattgaatgagatatcctcgacccttgcaaccttgcagacacaaatgcaagcaagacaactgcagggtgatcagacaactgttctgaattctaatgccagcaaatcgaatgagatatcctcgactcttgcaaccctgcagacacaaatgcaagcagatataagacaactgcggtgtgacgtcttcagagtttttacaaaagagatggagggggttgttagagctatcaggtctgtcaatagtaggcctgctgcaatgcaaatgatggcagaccagagttaccaagtaccagtttcaaatggatggacccagattaaccagacaccagtagcagctggaaggtctccaatgaaccgagcaccagtagcagctggaaggtcccggatgaaccaattacctgaaacaaaagtgctttctgcacatttggtttatcctgcaaaggtgacagatctgaagccaaaggtggagcagggaaaggtaaaagcagctccacaaaagccgtttgcttcgagctactacagggtggcacctaaacaggaagaggtagcgattagaaaggtcaatatacaagtgccagcaaagaaggcaccagtcagcataatcatcgagtcggatgatgacagtgaaggacgtgcgtcctgcgtgattttgaagacagaaacaggtagcaaggagtggaaagtgacaaagcaaggcaccgaagagggcctggagatcctgcggagggcgaggaagaggaggaggagagagatgcagtccatcgtgctcgcatcctagctaattaatggtaacgccgcatgcatcgtcatcatcatctcaagattgactgattgttttaacataaagccaaacaaaggaaagagataaagattacgacaagacgaaattaaaaggtaaatcaaccactaaactagagagctagaacctgctgtccagtgctgctgttgttattgttgcggttgttgttgggaggtcgagtggacaactaacttaccatgctgccgaatgctgtaccgcatcacaaacagacaccacttttcgcacatactgtagagcaaccagctgatgccattcctatata

SEQ ID NO: 227 - protein, 492 aa, Oryza sativa
MKLKMNKACDIASISVLPPRRTGGSSGASASGSVAVAVASQPRSQPLSQSQQSFSQGASASLLHSQSQFSQVSLDDNLLTLLPSPTRDQRFGLHDDSSKRMSSLPASSASCAREESQLQLAKLPSNPVHRWNPSIADTRSGQVTNEDVERKFQHLASSVHKMGMVVDSVQSDVMQLNRAMKEASLDSGSIRQKIAVLESSLQQILKGQDDLKALFGSSTKHNPDQTSVLNSLGSKLNEISSTLATLQTQMQARQLQGDQTTVLNSNASKSNEISSTLATLQTQMQADIRQLRCDVFRVFTKEMEGVVRAIRSVNSRPAAMQMMADQSYQVPVSNGWTQINQTPVAAGRSPMNRAPVAAGRSRMNQLPETKVLSAHLVYPAKVTDLKPKVEQGKVKAAPQKPFASSYYRVAPKQEEVAIRKVNIQVPAKKAPVSIIIESDDDSEGRASCVILKTETGSKEWKVTKQGTEEGLEILRRARKRRRREMQSIVLAS

SEQ ID NO: 228 - DNA, 1752 bp, Setaria italica
atgaagcttaagatcaataaggcgtgcgacctcggctccatctccgtcctccctccccgtaggaccggagggagcggcggcgccggcgtggtgggcgcgtcgggttcctccgccgcggccctggcggggtcgcagcagcagcagcagcagcgctcgcagccgctatcgcagcagtccttctcgcagggcgttgggggaagcggaggcgggtcgtcgctcctgcactcgcagtcgcagctctcgcagggatccctcgacgatagcctcctcagcctccacctcgcgtctcccacgcgcgatcagagatttgggttacatgatgactcatcaaagaagatgccttcgttgcctgtcaactcagcttcttgtgtgcgagaagaatctcagctgcaactggcaaaaatatcaagcaaccctgtccatcgatggaatccttctcctcctgacagtcaggttcctaatgaagatgttgagcgcaaatttcagcatctggcaagttcggtgcataagatggggatggtactcgattcggtgcaaaatgatgttatgcagttaaacagagccatgaaggaagcatcactagattctggaagcatacagcagaaggtggttgtcctagacaattcactgcagaaagttcttaagggacaagatgatctcaaagcactttttgagagcagcaccaaaagcattgctgatcagctgagtgttctgaactcccattcccgcaaactggatgagatatcctcgaccctttcagtctggccgaaacaaatagagatagatttaaggcaacttcaaagtgacatcttcagaatttttgcaaaagagatggaggggattgttagagctatcagatctctcaacagtaggcctgctgcaatccaaatgccaacagaccagagctgcatgaccaatggaaggccactgatgaaccaactaccactagtaaatgaaaggtcccaggtgaaccaaacaccagtagcaacccgggtgagccaaacaccagttgcaatcatggtgaaccaaacaccagtagcaagcttggtgagccaaacagcaggagcaaatggaagacacttggcgagccaaacaccagcagcaaatgggaaaactctgatgaaccaaacatcagtagctgatggaagatccctgatgagccaaacaacagcaccaaatggaagacctgtgatgagccagagaccagcagcaaatggaaggtcccagacgaaccaaatacatgtagcaagtggacagccctatacgaacaaaataccagcaccaaaacatgttcagaggctactgcagtggaatgtttgtttgtttgttttttatattagctatggatttttcagttttattattttcacatatgaatgcttccttattatcggcaggcatcctgcacctttggcttgccccgcaaaggttgcagatccgaagttgaaggtagaagagggaaagatgaaagcgcttccccaaaggttgaccggtggttctagaagcagggtggtacctaaacaggaagaggtgccaactacaaaggtcacccggagtgtggcaactaagaaggcaccgccggccttgataatcatcgactctgatgatgacagcgaaggtcgcgtctcctgcgtgatcctcaagtcctcagaatcaggtgacaaggagtgcgacctgatgaaggaagccgcggaagagagccagcagatcctgcggagggccaggaagcggcggagaagagagatgctgcag

SEQ ID NO: 229 - protein, 584 aa, Setaria italica
MKLKINKACDLGSISVLPPRRTGGSGGAGVVGASGSSAAALAGSQQQQQQRSQPLSQQSFSQGVGGSGGGSSLLHSQSQLSQGSLDDSLLSLHLASPTRDQRFGLHDDSSKKMPSLPVNSASCVREESQLQLAKISSNPVHRWNPSPPDSQVPNEDVERKFQHLASSVHKMGMVLDSVQNDVMQLNRAMKEASLDSGSIQQKVVVLDNSLQKVLKGQDDLKALFESSTKSIADQLSVLNSHSRKLDEISSTLSVWPKQIEIDLRQLQSDIFRIFAKEMEGIVRAIRSLNSRPAAIQMPTDQSCMTNGRPLMNQLPLVNERSQVNQTPVATRVSQTPVAIMVNQTPVASLVSQTAGANGRHLASQTPAANGKTLMNQTSVADGRSLMSQTTAPNGRPVMSQRPAANGRSQTNQIHVASGQPYTNKIPAPKHVQRLLQWNVCLFVFYISYGFFSFIIFTYECFLIIGRHPAPLACPAKVADPKLKVEEGKMKALPQRLTGGSRSRVVPKQEEVPTTKVTRSVATKKAPPALIIIDSDDDSEGRVSCVILKSSESGDKECDLMKEAAEESQQILRRARKRRRREMLQ

SEQ ID NO: 230 - DNA, 1794 bp, Sorghum bicolor
atgaagcttaagatcaacaaggcgtgcgacctcggctccatctccgtcctccctccccgtaggaccggagggagcggcggcgcaggcgaggcgggttcctccgccgcggccgtggcggcggggtcgcagcagcggtcgcagccgatgtcgcactcgcagcagtccttctcgcagggcgttatggggagcggcggcgcgtcgtcgctcctgcactcgcagtcgcagctctcgcaggcctccctcgacgagaatctcctcagcctccacctcgcctcgcccacgcgcgatcagagatttgggttgcatgacgactcatcaaagaagatgccatcattgcctgtcagctcggcgtcttgtgtgcgagaagaatctcagctgcaactggcaaaaacaccaagcaaccctgtccatcgatggaacccttctcttcctgatggcagtgttttaacaggtgtggttcctactgaggatgttgagcgcaaatttcagcatatggcaagttcggtgcataaggtagggatggtgctcgattcagtgcaaaacgacgttatgcagttaaacagagccatgaaggaagccgcactagattctggaagcatgcagcaaaagattgttgtcctagacacttcactgcagaagaatcttaagggacaagatgatctcaaagcacttgttgagagcaacaccaaaagcatctctgatcagctgactgttcttaactcccactccaacaaactggatgagatatcctcaaccctttcaatcttgccgaaacaaatagaaacagatttaaagcaacagcacagtgacatcttcagaatttttagaaaagacatggaggagattgttagagctgtcagatctctcaacagtaagattgatgcaatccaaatgccaacagaccagcgatgcacaatcaatggaaggcccctaatgaaccaactaccagtcgatagaaatgaaaggccccaggtgaaccaaacaccagaggtaacccggatgagccaaacaccagtagcaaccatggtgaaccaaacatcagtagcaagcttggtgaaccaaacaccagcagcaaatggaaggcacctggtgagccaaataccagcagcaaatgggaaaactttggtgagccaaacatcagtagcaaatggaagatccctgatgagccaagtaccaacagcaaatgggaaacctctgacgaaccaagcatcactagcaaatggaggatccctgatgagccaagtaccagcagcaaatgggaaacctctgacgaaccaaataccagcaccaaagggaagacccatgatgaggcagaaaacaggagaaagaggaaggccccagatgaaccaaatacctgtagcaagcttgcttactgatggcaggcatcctgcacctttggtcttccctgcaagtgcaaaggcagcagcagacccgaaggcgaaggtagacgacggaaaactgaaagtgcttccccaaaagctaactggttctagatccagggtgacacctaaacaggaagaggcggcgagtacaaagttcagccgggcagcagcaactgagaaggtggtgatattcatcgaggactctgacgatgacagcgacgtccgtgcttcttcctgcgtgatcctcaggtcatcgggatcaggtgcaggtgcaggtgcaggtgagagggagtgcgacctgatgaaggtgggcgcggaggagagccaggagatcatgcggagggccaggaagcggaggagaagagaaatgcaggccaccgttgccagcatgccgcctgaggttgggcactag

SEQ ID NO: 231 - protein, 597 aa, Sorghum bicolor
MKLKINKACDLGSISVLPPRRTGGSGGAGEAGSSAAAVAAGSQQRSQPMSHSQQSFSQGVMGSGGASSLLHSQSQLSQASLDENLLSLHLASPTRDQRFGLHDDSSKKMPSLPVSSASCVREESQLQLAKTPSNPVHRWNPSLPDGSVLTGVVPTEDVERKFQHMASSVHKVGMVLDSVQNDVMQLNRAMKEAALDSGSMQQKIVVLDTSLQKNLKGQDDLKALVESNTKSISDQLTVLNSHSNKLDEISSTLSILPKQIETDLKQQHSDIFRIFRKDMEEIVRAVRSLNSKIDAIQMPTDQRCTINGRPLMNQLPVDRNERPQVNQTPEVTRMSQTPVATMVNQTSVASLVNQTPAANGRHLVSQIPAANGKTLVSQTSVANGRSLMSQVPTANGKPLTNQASLANGGSLMSQVPAANGKPLTNQIPAPKGRPMMRQKTGERGRPQMNQIPVASLLTDGRHPAPLVFPASAKAAADPKAKVDDGKLKVLPQKLTGSRSRVTPKQEEAASTKFSRAAATEKVVIFIEDSDDDSDVRASSCVILRSSGSGAGAGAGERECDLMKVGAEESQEIMRRARKRRRREMQATVASMPPEVGH

SEQ ID NO: 232 - DNA, 768 bp, Vitis vinifera
atgaagatgaagataaacaaagcctgcgatctgagttcgatttcagttcttcctcctcataccaggagatcaagcaccgtgccaactggaccacaagtatcacagcagctccgatcacagcagcagtcacagcaatctttctcgcagtcgcagcatggaatgttttctcagttttcacagaactctcttgatgaaattgtggcaaatgatcagagatttggttctcaagaaagagagaattcgatgaaaaggatttcttgcttagccccagttagttttacaagggaagagagtcaaattccaatttcaaggtcttccaccagcctagctcgcaaatggagttctgcctccgctcctgattatagatgtcagattggtgaagacctggagcacaggattgggatgatggaaacttcattaaccaggtttggaatgatcttggattctattcagagtgatgtcatgcaagtgaataaaggaatgaaggaattcctaatggagatggaaggccttcggcagaagttaactgttcatgatagctcacttctgctaatgaacaagggacatgaagatatcaaagataggcttgatgctgccttgaagtctatttctgatcaaatgaacaaggatttatatcaagacaacttacagcagagcttcttaatgctttcagctttaccagagcagattgaaatgtgtttacaaaaattacaaaatgaactctgcaagaccatcaccaaagaaatgcaggcatgtataatactctaa

SEQ ID NO: 233 - protein, 255 aa, Vitis vinifera
MKMKINKACDLSSISVLPPHTRRSSTVPTGPQVSQQLRSQQQSQQSFSQSQHGMFSQFSQNSLDEIVANDQRFGSQERENSMKRISCLAPVSFTREESQIPISRSSTSLARKWSSASAPDYRCQIGEDLEHRIGMMETSLTRFGMILDSIQSDVMQVNKGMKEFLMEMEGLRQKLTVHDSSLLLMNKGHEDIKDRLDAALKSISDQMNKDLYQDNLQQSFLMLSALPEQIEMCLQKLQNELCKTITKEMQACIIL

SEQ ID NO: 234 - DNA, 282 bp, Vitis vinifera
atgggaagctggaactcagtacaacgagaacgagccactttcccagataggaactccaacaggcagcccaaacagaatggagtttctcctcttgaacgggaaagagaatgcagggttatcattgactctgatgaggaaattgatggaggcttttcctgcttgcttcaggaaaaagaatcaggaaaccatttggtagaggaagtgaaggaagagactgaacgaatcctgaggaaagcaagaaggagaaagagaaaatattctaacactattattttgaattga

SEQ ID NO: 235 - DNA, 1909 bp, Zea mays
caaattcgcagcgcagcgccctcattttgtcattacgttgctctgctcctggctcacctcaccagcgatcactaccggagcaggccatgaagcttaagatcaacaaggcatgcgacctcggctccatctccgtcctccctccccgtaggaccggtgggagcggcggcgcaggaggggcgggttcctccgccgcgcccgtggcggcggggtcgcagcagaggtcgcagccgatgtcgcagcactccttctcgcagggcgttgtggggagcggcggcgcgtcgtcgctcctgcactcgcagtcgcagctctcgcaggcctccctcgacgagaatctcctcaccctccacctcgcctcgcccgctcgcgatcagagattcgggttccatgacgacttatcaaagaagatgacatcgttgcctgtcagctcggcttcttgtgtgcgagaagaatctcagctgcaactggcaaaaacatcaagcaaccctgtccatcgatggaacccttctcttcctgacggtagaagtgtgggtcctactgaggatgttgagcgcaaatttcagcatatggcaagttcagtgcataaggtagggatggtgcttgattcagtgcaaaccgacgttatgcagctaaacagagccatgaaggaagccacactagattctggaagcatacagcaaaagattgttctcctagacgctttgctgcagaaaaatcttaagggacaagatgatctcaaagctcttgttgagagcaacaccaaaagcatctccgatcagctgactgttctgaactcctactccaacaaactggatgagatatcctcaaccctttcaatcttgccaaaacaaatagaaacaaatttgaagcaacagcagagtgacaccttccgaatttttagaaaagacatggaggagattgttagagctgttagatctctcaacaataagattgatgcaatccaaatgccaacagaccagagctgcacaaccaatggaaggcccctgatgaaccaactgccagtcgatagaaatgaaaggccccaggtgaaccaaacaccagaggtaacccgggtgagccaaacaccggtagcaaccatggcgaaccaaagaccagtagcaaaaggaaggcacctggtgagccaaacaccagcagcaaatgggaaacctctgacgaaccaaacatcagtagcaaatggaagatccctgatgagccaagtaccagcagcaaatgggaaacctctgacgaaccaaatagcagtgccaaagggaagacccatgatgaggcagaaaacagcagaaggaggaaggccccagatgaaccaaatacctgtagcagatggatggccccatacaaacaaaatacacgcgccggaagtgcggcatcccgtacctttggtgtgccctgcagcaggcccgaggccgaaggtagaggagggaaagctgagagcggttccccaaaagctaactggttgtagatccagggtgacacctaaacaggaagaggcggcgacgaatacaaaggtcgtcgtcggccgggcagcggcaactgagaaggtggtgatattcatcgacgacgactccgacgatggcggcagcgaggcccttgcttcctgcgtgatcctgaggccggcgcccctggggtcaggtgcaggtgagtgcgacctggtgaaggtgggcgcggaggagagccaggagatcctgaggagggccaggaagcggaggagaagagaaatgcaggccattgtggcctgcatgccgcctgagcttgggtactagtagctagctacttctcatatcaatatatcatggatggatggatgcagttcctaatcgagaaaaagggatagttagttgtgtggttttgttgttgcgatggaatgaatcgagcagcatggatggattggttgatt

SEQ ID NO: 236 - protein, 562 aa, Zea mays
MKLKINKACDLGSISVLPPRRTGGSGGAGGAGSSAAPVAAGSQQRSQPMSQHSFSQGVVGSGGASSLLHSQSQLSQASLDENLLTLHLASPARDQRFGFHDDLSKKMTSLPVSSASCVREESQLQLAKTSSNPVHRWNPSLPDGRSVGPTEDVERKFQHMASSVHKVGMVLDSVQTDVMQLNRAMKEATLDSGSIQQKIVLLDALLQKNLKGQDDLKALVESNTKSISDQLTVLNSYSNKLDEISSTLSILPKQIETNLKQQQSDTFRIFRKDMEEIVRAVRSLNNKIDAIQMPTDQSCTTNGRPLMNQLPVDRNERPQVNQTPEVTRVSQTPVATMANQRPVAKGRHLVSQTPAANGKPLTNQTSVANGRSLMSQVPAANGKPLTNQIAVPKGRPMMRQKTAEGGRPQMNQIPVADGWPHTNKIHAPEVRHPVPLVCPAAGPRPKVEEGKLRAVPQKLTGCRSRVTPKQEEAATNTKVVVGRAAATEKVVIFIDDDSDDGGSEALASCVILRPAPLGSGAGECDLVKVGAEESQEILRRARKRRRREMQAIVACMPPELGY

SEQ ID NO: 237 - DNA, 2021 bp, Zea mays
atgacgggagcaggcatgaagcttaagatcaacaaggcatgcgacctcagctccatctccgtcctccctccccgtaggaccggagggagtggcggcgcaggttcctcggccgcggccgcggctgtggcggcggggtcgcagcagcggtcccagccgctgtcgcagcaatccttctcgcagggcgctgtggggagcggcggcgcgtcgtcgctcctgcactcgcagtcgcagctatcgcaggcctccctcgacgagaacctcctcacactccacctcgcttcgcccgcgcgcgaccagggattcaggttgcatgacgactcatcaaagaagatgacatcgttgcctgtcacctcagcttcttgtgtgcgagaagaatctcagctgcaactggcaaaaacatcaagcaaccctgtccatcgatggaacccttctcttcctgatagtagatgcagtggtttaacaggtgtggttcctgctgaggatgttgagcgcaaatttcagcatatggcaagttcagtgcataaggtagggatggtgctcgattcagtgcaaaacgacactatgcagttaaacagagccatgaaggaagctgcactagattctggaagcatacagcaaaagattgttgtcctcgacacttcgatgcagaaaaatcttaagggacaaggtgatctcaaagtgcttgttgagagcaacacaaaaaacattgctgatcagctggctgttctgaactcccactccaacaaactggttgagatatcctcagccctttcagtcttgccgaaacaaatagaaagagatttaaagcaacaacagagtgacatcttcagaatttttagaaacaacatggaggagattgctagagctgtcaaatctctcaacagtaagatcgatgcaatccaaatgccaacagagcagagatgcacaaccaatggaaggcccctgatgaaccaactaccagtcgatagaaacgaaaggcctcaggtgaaccaaacaccagaggtaacccgggtgagccagacaacagtagcaagcttagtgaaccaagcaccagcagcaaatggaaggcacctgatgagcaaaacaccagcagcaaatgggaaaagtgtgatgagacaaacaccagcagaaaatggaaggcacctagtgagccaaacacctgcagcaaatggaaaaactctgaagagacaaacatcagtaacaaatggaatttccctgatgagccaagtaccagcagcaaatgggaaacctgtggtgatccaaataccagcaccaaaaggaagacctatgatgaggcagaaaacagcagaaagcggaaggaccgagatgaacgaaatacccgtagcaagtggacgaccccatacaaacaaaatacccatagcggaagtgcatcccgcacctttggtgtgccctgcaaagcaggtagcaacagacccgaagcccaaggtagacgaggaaaagctgaaagcgcttccccaaaagctaactagttctagatccagggtggcacctaaacaggaagaggcggcaaatacaaaggtcatcagccgggcagcggcaactgagaaggtggtgatattcatcgacgactctgacgatgacaacgacgtccgtgcttcctgcgtgatcctcaggccctcgggatcaggcagcttaggtgagagggaatgcgacctgatgaaggtgggcgcggaggagagccaggagatcccgcggagggccaggaagcggaggagaagagaaatgcaggccactgtgggtgtggcatgtatgccgctgcctgcctgagcttcggtatggttgactgattggtataattgactgattaattgatgcggtcggtaatttagagcagtgtttgcactgcactgcatactctataaaaggaacagtagtagataggtgaacatgaatgaatgaggacaggaaaacaaaggatcagggttatattatgaatatagtagagagaaacacagttttgttgtggtgtttgttgtgttataataaatcatattggaggt

SEQ ID NO: 238 - protein, 595 aa, Zea mays
MTGAGMKLKINKACDLSSISVLPPRRTGGSGGAGSSAAAAAVAAGSQQRSQPLSQQSFSQGAVGSGGASSLLHSQSQLSQASLDENLLTLHLASPARDQGFRLHDDSSKKMTSLPVTSASCVREESQLQLAKTSSNPVHRWNPSLPDSRCSGLTGVVPAEDVERKFQHMASSVHKVGMVLDSVQNDTMQLNRAMKEAALDSGSIQQKIVVLDTSMQKNLKGQGDLKVLVESNTKNIADQLAVLNSHSNKLVEISSALSVLPKQIERDLKQQQSDIFRIFRNNMEEIARAVKSLNSKIDAIQMPTEQRCTTNGRPLMNQLPVDRNERPQVNQTPEVTRVSQTTVASLVNQAPAANGRHLMSKTPAANGKSVMRQTPAENGRHLVSQTPAANGKTLKRQTSVTNGISLMSQVPAANGKPVVIQIPAPKGRPMMRQKTAESGRTEMNEIPVASGRPHTNKIPIAEVHPAPLVCPAKQVATDPKPKVDEEKLKALPQKLTSSRSRVAPKQEEAANTKVISRAAATEKVVIFIDDSDDDNDVRASCVILRPSGSGSLGERECDLMKVGAEESQEIPRRARKRRRREMQATVGVACMPLPA

SEQ ID NO: 239 - DNA, 939 bp, Arabidopsis thaliana
atgggagaaatgattgtttcaatggaccaagatatccgactggatacaacacgagcaagattgtcaaaccttctcaagaggcatcgagaattgtcagaccgtcttactagggattctgataagacaatgttagatcgcttaaacaaagaatttgaagctgcacggagatcccaaagtcaggaagtcttcttagatggggaagagtggaatgatggtttgttggccacattaagggaacgggtgcatatggaagctgacagaaaggcagataacggtaatgcaggtttttcactagtttgtcatcctgaagaacgaattacttacagagtgggaaataaggtgatatgttgcctagatggatcgagaattggaatacagtttgaaacatctactgcaggagaaacttacgaggtttaccactgtgtgcttgagagcaagtcgtttttggagaagatgattgtgcttgagcacacaattcctttctttttgccgctaagtgacttggaaaatgatcttcttttttcgaatgctaagaaattcatcgataatgttggggatctcctgcaagcatatgtggacagaaaggaacaggtccggcttatcaaagagctctttggacatcagatcagtgagatttatcacagtcttccttaccacatgattgaattttctatggatgattgtgactgcaagttcgtggtgagccttagatatggagatcttctgtgtgaacttccgacaaaagtgagaattctagtatggccaatgcatcatctgtcgaagaaacagtgtacaagccctggaagtccagcaatccctgtgcgtttaccatttgccgaggatgctttccggatccaatcactacctgaagcatacgcagagattatgccgaacatgccgaatgaaattcggcaattatttcagactagtccaagctaa

SEQ ID NO: 240 - protein, 312 aa, Arabidopsis thaliana
MGEMIVSMDQDIRLDTTRARLSNLLKRHRELSDRLTRDSDKTMLDRLNKEFEAARRSQSQEVFLDGEEWNDGLLATLRERVHMEADRKADNGNAGFSLVCHPEERITYRVGNKVICCLDGSRIGIQFETSTAGETYEVYHCVLESKSFLEKMIVLEHTIPFFLPLSDLENDLLFSNAKKFIDNVGDLLQAYVDRKEQVRLIKELFGHQISEIYHSLPYHMIEFSMDDCDCKFVVSLRYGDLLCELPTKVRILVWPMHHLSKKQCTSPGSPAIPVRLPFAEDAFRIQSLPEAYAEIMPNMPNEIRQLFQTSPS

SEQ ID NO: 241 - DNA, 1452 bp, Brassica napus
gtcccgtcgctggtcttaagtctctgttcctccgcctgatcttacccggcgattgcgacggctcttcgcctctccccgccaattcgacctgttttcttctctactcgtcggcgtcggtgagcttggtcaattgggagctctctggaaagcaaagatgggagagatgattgtttcgctggacgaagacattccattggattcaacacgagcacgattcacgaatcttctcaagaggcatcaacaattgacagaccgtcttaccagggattctgataagatgatatttgatcggttaagcaaagaatttgaagctgcacgggcttcccaaaatcaagaagtatgcttagatggggaagagtggaatgatggcttgttggctacactaagagaacgggtgcatatggaggctgacaaaaaggagagcgggaattcaggttttgcaccagtttctcatcttgaagaacgaattgcttacagggtgggaaataaggtgatttattgcttagagggagcgagaattggaatacagtatgaaacatcttttgcaggagaaacttacgagatttaccactgtgtgcttgagagcaagtcgtttttggagaagatgaatgtacttgagcacacaattccattctttttgccactacgtgacttggaaaatgatctactttcttcgaatgctaagaaattcatcgataatgttggggatctcctgcacgcatatgtggaaaggagggagcaggtccggcttatcaaagagctctacggaaatcagatcagggagctttatcacagtcttccttaccacatgattgaatttgcgatagatgattgtgactgcaaggtggtggtgagcctgagatatgggaatcttatgtgtgaacttccgacaaaagtgagagttctagcatggccaatgcaccagctgaagaggcagtgcacaagccctaggttaagcaaacttgcaagtcaagcaatccctgtgcgtttatcttttgccgaggatgccttaaggatccaatcactacctgaagcatacgcagagattgtagtaaacatgccacaagaaattgagcaaatatttctgtagaggagttggagctaagactgaagctttctctaaatcatatatatatatatctcgctgctttcttgtgtgatatttggtgataatccttctaacaatgttaaaattgtgccacagaattgattctgttctgcgtttctgttactatgtttcattcaacttggaagttaagagtagctgtaaaaaagtttacaaattaaactaaacttgtctattgtaggtttgattcaattatcagagacataatgtatatagcctagttagatgttttttggatggtccaccagtataatatttctcatattaaaggccttagttgaagtaattgtaaatataaaaataaaagtaatgttactatagtctac

SEQ ID NO: 242 - DNA, 1095 bp, Brassica rapa
atgaagcgtgagggttcttttcatctttgtatcggtgttggatggtttgttatagctgatgagctactctttgtaaaggaatctccgtttcaaattttggaatattgtgttgagttaggactagttatcgtaggattgttcataagaaaaactggggactttagatgtgatattgtttcgctggacgatgacattccactggattcaacacgagcacgattcacgaatcttctcaagaggcatcaacaattgactgaccgtcttaccagggattctgataaaatgatatttgatcggttaagcaaagaatttgaagctgcacgggcatcccaaagtcaagaagtatgcttagatggggaagagtggaatgatggcttgttggctacactaagagaacgggtgcatatggaggctgacaaaaaggatagcggcaattcaggttttgcaccagtttctcatcttgaagaacgaattgcttacagagtgggaaataaggtgatctattgcttagagggagcaaggattggaatacagtatggaacatcttttgcaggagaaacttacgagatttaccactgtgtgcttgagagcaagtcgtttctggagaagatgaatgtacttgagcacacaattccattctttttgccactgcgtgacttggaaaatgttcttctttcttcgaatgctaagaaattcatcgataatgttggggatctcctgcacgcatatgtggagaggagggagcaggttcggcttatcaaagagctctatggaaatcagatcagggagctttatcatagtcttccttaccacatgattgaatttgccatagatgattgtgactgcaaggtggtggtgagcctgagatatgggaatcttatgtgtgaacttccgacaaaagtgagagttctagcatggccaatgcaccagctgaagaggcagtgcacaagccctaggttaagcaaacttgctagccaagcaatccctgtgcgtttatcttttgccgaggatgccttaaggatccaatcactacctgaagcatacgcagagattgtagtaaacatgccacaagaaattgagcaaatatttctgtag

SEQ ID NO: 243 - protein, 364 aa, Brassica rapa
MKREGSFHLCIGVGWFVIADELLFVKESPFQILEYCVELGLVIVGLFIRKTGDFRCDIVSLDDDIPLDSTRARFTNLLKRHQQLTDRLTRDSDKMIFDRLSKEFEAARASQSQEVCLDGEEWNDGLLATLRERVHMEADKKDSGNSGFAPVSHLEERIAYRVGNKVIYCLEGARIGIQYGTSFAGETYEIYHCVLESKSFLEKMNVLEHTIPFFLPLRDLENVLLSSNAKKFIDNVGDLLHAYVERREQVRLIKELYGNQIRELYHSLPYHMIEFAIDDCDCKVVVSLRYGNLMCELPTKVRVLAWPMHQLKRQCTSPRLSKLASQAIPVRLSFAEDALRIQSLPEAYAEIVVNMPQEIEQIFL

SEQ ID NO: 244 - DNA, 1462 bp, Glycine max
gaagaaggcatcaccgcgttgtgttgtgattgaaaatggagagcgatgtcgaagaatctctgcggaagaggcccagaaaataccctttctccgccgattcatcttctcgcaagcaatttgaacaatattctggacggacatttgcatttacgggggaagtgaattttatgcaagatgatgataatcgtctggagattacccgaactaaatttggaagtttgcttaaaagacacggagatttgacagagcgtcttgctagggattctgacaagataatatttgagcgtctacagaaggagtttgaagctgcacgagcttctcaaactgaagagatatgtttagacggggaagagtggaatgatggactactagctacaataagagagcgggtgcatatggaggcagacagaaaagcaatgcatggggatgctgacatattagcatgtcctcaggataaaattacatataaaattggaaacaaggtaatttgctgtttggaaggggcaagaattggtgtacaatatgagacatcttttgctggtgaaccttgtgagttttaccattgtgtgctggagagtaagtcatttcttgaaaagatgactgtccttgaacatacagttccatttttcctgccaatacgagaaatagaaaatgatctcctttcatccaatgcaatgaaattcatagatcatgttggagatctattgcaggcttttgtggatagacgggaacaggtcagacttataaaggagctgtatggaaatcaaattagagagctgtatcatagccttccctaccatatgatcgaatttgtattggatgattctgattgcaaggtgacagtcagccttagatatgcagatctcatttcggtgcttccaactcgaatttcagtgctagcctggcctatgttcaataaaaatactatggctactttgagcaggaaggaagatggactctcaggaagtcattcttctccaattcgcttaacctatgcagaagatgccttacgaaccatgagtttacctgaagcatatgcagagattgtattaaacttaccacaggcgcttcagcagacgtatcatcaaaaagcccctgcttagagcttcgccctttgagtagcctagatgcatcagtaaaaattcttggtagagatgttaaatattagataaacaacttcagaattattacctattcacctagccaaattgctcataggttgagttcattttgctgtaatattgtcatatagcatttagcatttgtatttcggcctctctggcctcgttattccttcaatacctgctacggtgtcttgtatcattaatacaacagggctaggtttacatctattcaaactgttgtcattcatcttttctccataattcaacatgtatgtaatttgatttcatataagttccatcttttttacatggcaagcaaaaatagcaagtatgaaggc

SEQ ID NO: 245 - protein, 355 aa, Glycine max
MESDVEESLRKRPRKYPFSADSSSRKQFEQYSGRTFAFTGEVNFMQDDDNRLEITRTKFGSLLKRHGDLTERLARDSDKIIFERLQKEFEAARASQTEEICLDGEEWNDGLLATIRERVHMEADRKAMHGDADILACPQDKITYKIGNKVICCLEGARIGVQYETSFAGEPCEFYHCVLESKSFLEKMTVLEHTVPFFLPIREIENDLLSSNAMKFIDHVGDLLQAFVDRREQVRLIKELYGNQIRELYHSLPYHMIEFVLDDSDCKVTVSLRYADLISVLPTRISVLAWPMFNKNTMATLSRKEDGLSGSHSSPIRLTYAEDALRTMSLPEAYAEIVLNLPQALQQTYHQKAPA

SEQ ID NO: 246 - DNA, 1374 bp, Glycine max
accgcgttgtgttgtgattgaaaatggagagcgatgttgaagaatctatgcggaagaggcccagaaaatatcctttctccgccgattcatcctctcgcaagcaatttgaacaatattctggacggacatttgcaattatgggggaagtgaattttatgcaagatgatgataatcgtttggagattacccgaactaaatttggaagtttgcttaaaagacatggagatttgacagagcggcttgctagggattctgacaagataatatttgagcgtctacagaaggagtttgaagctgcacgagcttctcaaactgaagagatatgtttagacggggaagagtggaatgatggtctactagctacaataagagagcgggtgcatatggaggcggacagaaaagcaatgcaaggggatgcggacatattagcatgtcccctggaaaaaattacatataaaattggaaacaaggtaatttgctgtttggaaggggcaagaatcggcgtacaatatgagacatcgtttgctggtgaaccttgtgagttttaccattgtgtgctggaaagcaagtcatttcttgaaaagatgactgtccttgaacacacagttccatttttcctgccaatacgagaaatagaaaatgatctccattcatccaatgcaatgaaactcatagatcatgttggagatctattgcaggcttttgtggatagacgggaacaggtcagacttataaaggagctgtatggaaatcagattagagagctgtatcatagccttccctaccatatggtcgaatttgtattagatgattctgattgcaaggtgacagtcagccttagatatgcagatctcatttcggtgcttccaactcgaatttcagtgctagcctggcctatgttcaataaaaatactatgagtaggaaggaagatggactctcgggaagtcattcttccccaattcgcctaacatatgcagaagatgccttacgaaccatgagtttacccgaagcatatgcagagattgtattaaacttaccacaggcgattcggcagacgtatcatcaaaaagccaccgcttagagctttgccctttcagtagcctagatgcatctgtaaaaattcttggtagagatgttaaatattagaaaaacaacttcagaattattacctatttacctagtcaaattgctcaggttgagttcattttgctgtaatattgtcatatagcatttagcatttgtacttcggcctctctggcctcgttattccttcaatacctactccggtgtcttgtatcattaatacaacagggctaggtttacatctattcaaactgctgtcattcatcttttcttcataattcaatatgtat

SEQ ID NO: 247 - protein, 352 aa, Glycine max
MESDVEESMRKRPRKYPFSADSSSRKQFEQYSGRTFAIMGEVNFMQDDDNRLEITRTKFGSLLKRHGDLTERLARDSDKIIFERLQKEFEAARASQTEEICLDGEEWNDGLLATIRERVHMEADRKAMQGDADILACPLEKITYKIGNKVICCLEGARIGVQYETSFAGEPCEFYHCVLESKSFLEKMTVLEHTVPFFLPIREIENDLHSSNAMKLIDHVGDLLQAFVDRREQVRLIKELYGNQIRELYHSLPYHMVEFVLDDSDCKVTVSLRYADLISVLPTRISVLAWPMFNKNTMSRKEDGLSGSHSSPIRLTYAEDALRTMSLPEAYAEIVLNLPQAIRQTYHQKATA

SEQ ID NO: 248 - DNA, 1465 bp, Glycine max
gaagaaggcatcaccgcgttgtgttgtgattgaaaatggagagcgatgtcgaagaatctctgcggaagaggcccagaaaataccctttctccgccgattcatcttctcgcaagcaatttgaacaatattctggacggacatttgcatttacgggggaagtgaattttatgcaagatgatgataatcgtctggagattacccgaactaaatttggaagtttgcttaaaagacacggagatttgacagagcgtcttgctagggattctgacaagataatatttgagcgtctacagaaggagtttgaagctgcacgagcttctcaaactgaagagatatgtttagacggggaagagtggaatgatggactactagctacaataagagagcgggtgcatatggaggcagacagaaaagcaatgcatggggatgctgacatattagcatgtcctcaggataaaattacatataaaattggaaacaagcaggtaatttgctgtttggaaggggcaagaattggtgtacaatatgagacatcttttgctggtgaaccttgtgagttttaccattgtgtgctggagagtaagtcatttcttgaaaagatgactgtccttgaacatacagttccatttttcctgccaatacgagaaatagaaaatgatctcctttcatccaatgcaatgaaattcatagatcatgttggagatctattgcaggcttttgtggatagacgggaacaggtcagacttataaaggagctgtatggaaatcaaattagagagctgtatcatagccttccctaccatatgatcgaatttgtattggatgattctgattgcaaggtgacagtcagccttagatatgcagatctcatttcggtgcttccaactcgaatttcagtgctagcctggcctatgttcaataaaaatactatggctactttgagcaggaaggaagatggactctcaggaagtcattcttctccaattcgcttaacctatgcagaagatgccttacgaaccatgagtttacctgaagcatatgcagagattgtattaaacttaccacaggcgcttcagcagacgtatcatcaaaaagcccctgcttagagcttcgccctttgagtagcctagatgcatcagtaaaaattcttggtagagatgttaaatattagataaacaacttcagaattattacctattcacctagccaaattgctcataggttgagttcattttgctgtaatattgtcatatagcatttagcatttgtatttcggcctctctggcctcgttattccttcaatacctgctacggtgtcttgtatcattaatacaacagggctaggtttacatctattcaaactgttgtcattcatcttttctccataattcaacatgtatgtaatttgatttcatataagttccatcttttttacatggcaagcaaaaatagcaagtatgaaggc

SEQ ID NO: 249 - protein, 356 aa, Glycine max
MESDVEESLRKRPRKYPFSADSSSRKQFEQYSGRTFAFTGEVNFMQDDDNRLEITRTKFGSLLKRHGDLTERLARDSDKIIFERLQKEFEAARASQTEEICLDGEEWNDGLLATIRERVHMEADRKAMHGDADILACPQDKITYKIGNKQVICCLEGARIGVQYETSFAGEPCEFYHCVLESKSFLEKMTVLEHTVPFFLPIREIENDLLSSNAMKFIDHVGDLLQAFVDRREQVRLIKELYGNQIRELYHSLPYHMIEFVLDDSDCKVTVSLRYADLISVLPTRISVLAWPMFNKNTMATLSRKEDGLSGSHSSPIRLTYAEDALRTMSLPEAYAEIVLNLPQALQQTYHQKAPA

SEQ ID NO: 250 - DNA, 1077 bp, Medicago truncatula
atgcgattcgttgaaacggagagcgatgcggaagaatctatgcgaaagagactccgtagtaattcctttcactccgccgattatccctctcgcaacaagtttgaacaatatgctggacggacctatgcacccatgggggaaatgaattttatgcagcagcaagatgatgatagtcgcttggatattacacgagccaaatttggaagtttgcttaaaagacatgaaaatttggctgaccgtctttctagagattctgacaaggtaatatttgagcgtctaatcaaagagtttgaagctgcacgagcttctcaaactcaagagatatatttagatggggaacagtggaatgatggcctacttgctacagtaagagagcaggtgcatatggaggcagagagaaaagcattgtctggagatgctgacgtattaacaggtcatcaagaaaaagttacatacaaaactggaaacaagataatttgctgtttggaaggagcaagaattggcatacagtatgagacatcttttgctggtgaaatctgtgagttttaccactgcgtgctggagagcaagtcatttcttgaaaagatgactgtccttgagcacacagttccatttttcttgccaatacgtgaaacagaaaatgatcttctttcatccaatgcaatgaaattcatagatcatgttggagatctattgcaagcatacgtggatagacgggaacaggttagacttataaaggaactttatggaaatcaaattggagagctgtatcatagccttccttatcacatgatcgagtttgtattagatgattttgactgcaaagtgacagtcagccttcgatacacagatctcatttcggtgcttccaactcgaatctcagtgctagcctggccaatgttgaagataaattctactccaattttcaacatgatggaagatggaatctcaggaagtcatcctgctccagttcgactatcctatgctgaagatgccttacgaaccatgagtctaccagaagcatatgcagagattgtgttgaatcttccacaagctcttcagcagatatatcattaa

SEQ ID NO: 251 - protein, 358 aa, Medicago truncatula
MRFVETESDAEESMRKRLRSNSFHSADYPSRNKFEQYAGRTYAPMGEMNFMQQQDDDSRLDITRAKFGSLLKRHENLADRLSRDSDKVIFERLIKEFEAARASQTQEIYLDGEQWNDGLLATVREQVHMEAERKALSGDADVLTGHQEKVTYKTGNKIICCLEGARIGIQYETSFAGEICEFYHCVLESKSFLEKMTVLEHTVPFFLPIRETENDLLSSNAMKFIDHVGDLLQAYVDRREQVRLIKELYGNQIGELYHSLPYHMIEFVLDDFDCKVTVSLRYTDLISVLPTRISVLAWPMLKINSTPIFNMMEDGISGSHPAPVRLSYAEDALRTMSLPEAYAEIVLNLPQALQQIYH

SEQ ID NO: 252 - DNA, 1107 bp, Oryza sativa
atggcgaaggcgcggcgcggtggtcatcggaggtgcaggcgacggcggctgtgtgccgggacgggtgcgagggctcgcggagggcggggctgggatgggggcggatgggagggggcacggggacggggagccatgggaggggtccccgcaggggcctttggcctgtggttctccatggaggagagctcgcgcgaaggcagatggtggccgccggcgagagctgatggtgatggagggaggaagaagatgagaggaggggattctgataaactgatttttgagcggctacagagagaatttgaggctgcacgaactgcccaaactgaagagatcccaatagatgatgagcagtggaacgatggtttgctggcaaccatccgtgaaaaggtccatatggaggctgataggaaggccatggctaaccaagcaaatgttccagcagatcctcaattccagtcaaggactacatatagagtaaaaaacaaggttatctattgtttggatggtgcgagaattggtatacagtatgagacttattttgctggagaaccttgtgaaatttatcattgtgttttggaaagcaagtcattccttgaaaagatgactgtgattgagcacaccttacctttctttctgccaatacgagaagtagaaagtgaatttctatcatctaatgctattaaatttattgatcatcttgaagagattttgcagtcttatgttgacaggagggagcaggttcggcttatcaaggaactatatgggaaccaaattggagaactgttccacagtctctcttacaatttgatagaatttgtaatggaggattttgagtgcaaggttacagtcagtatccgatactcagatctattgttcaccctgccaagtcaggccagggtcctggcttggccacttcgctcttcgcggggaatatcagtaactgagcgcagagctagtcgctcagcatctgctcaactagtaccgttccgccttccctacgccgaggatgcgctgaagaccttgagtttgccagaagcgtttgcggagattgtgctgagcctaccccgtgctctgaagcggatactctcttctcaggaaagtgattga

SEQ ID NO: 253 - protein, 368 aa, Oryza sativa
MAKARRGGHRRCRRRRLCAGTGARARGGRGWDGGGWEGARGRGAMGGVPAGAFGLWFSMEESSREGRWWPPARADGDGGRKKMRGGDSDKLIFERLQREFEAARTAQTEEIPIDDEQWNDGLLATIREKVHMEADRKAMANQANVPADPQFQSRTTYRVKNKVIYCLDGARIGIQYETYFAGEPCEIYHCVLESKSFLEKMTVIEHTLPFFLPIREVESEFLSSNAIKFIDHLEEILQSYVDRREQVRLIKELYGNQIGELFHSLSYNLIEFVMEDFECKVTVSIRYSDLLFTLPSQARVLAWPLRSSRGISVTERRASRSASAQLVPFRLPYAEDALKTLSLPEAFAEIVLSLPRALKRILSSQESD

SEQ ID NO: 254 - DNA, 1194 bp, Setaria italica
atgggctcccgcacctcgcctcctcacgactatcttcacatgcatgttgagcaactaaggaggcgacatcagtcattatcagaattgacttttgcaagggatgaagatgcaaaacttgagaccacaagggcaaggctgtcaaacatcctcaaaaggcatgaagacttgaaagagcgcctttcacgggattctgataagctgatttttgagcgtctgcagaaagaatttgaggctgctcgagctgctcaaactgaagaaatttcaatagatgatgatgattggaatgatggtttgctagctaccatccgtgagaaggtccatatggaggctgacaggaaggccatggctaaccaagtaaatgttccagcagatcttccatttcaatcaaagactacatataggattagaaataaggttatctattgcttggatggagcgagaattggcatacagtatgagacattctttgctggtgagccttgtgaaatatttcattgtgttttggaaagcaagtcattcctggaaaagatgactgtgattgagcacaccttacctttctttctgcccatacgcgaattggaaagtgatctcctgtcatctaatgccattaaatttattgatcaccttgaagaaattttacaggcttatattgacaggagagaacaggttcggcttatcaaggagctctatgggaaccaaattggcgaactgttccacagtcttccttacaatgtgatagagtttgtcttggaggattttgagtgcaagattacagtcagtatccgatattcagatctacttctgaccctgccgagtcaggcaagggtcttggcttggccacttcgctcgtccaagagaatatccacacgaagcagcagtgcgtcagctgcacagccggtaccatttcacctttcatacgctgaggaagcactcaagacattgtgtctaccagaaggtccctatgctgccccttgtcttcaccttgccgtacaatatacccacaggtttgtgcggaactttgttctgatctgtttcctccctccctgttctgtgtttcagcttacgcggacattgtgctggacctaccccatgctctcaagaggattctcacctctcaggacagtgactgaatcatgcgtaggggatgctaatgaaattaaggatttcagactacaaacatggaactggtgttga

SEQ ID NO: 255 - protein, 397 aa, Setaria italica
MGSRTSPPHDYLHMHVEQLRRRHQSLSELTFARDEDAKLETTRARLSNILKRHEDLKERLSRDSDKLIFERLQKEFEAARAAQTEEISIDDDDWNDGLLATIREKVHMEADRKAMANQVNVPADLPFQSKTTYRIRNKVIYCLDGARIGIQYETFFAGEPCEIFHCVLESKSFLEKMTVIEHTLPFFLPIRELESDLLSSNAIKFIDHLEEILQAYIDRREQVRLIKELYGNQIGELFHSLPYNVIEFVLEDFECKITVSIRYSDLLLTLPSQARVLAWPLRSSKRISTRSSSASAAQPVPFHLSYAEEALKTLCLPEGPYAAPCLHLAVQYTHRFVRNFVLICFLPPCSVFQLTRTLCWTYPMLSRGFSPLRTVTESCVGDANEIKDFRLQTWNWC

SEQ ID NO: 256 - DNA, 1026 bp, Setaria italica
atgggctcccgcacctcgcctcctcacgactatcttcacatgcatgttgagcaactaaggaggcgacatcagtcattatcagaattgacttttgcaagggatgaagatgcaaaacttgagaccacaagggcaaggctgtcaaacatcctcaaaaggcatgaagacttgaaagagcgcctttcacgggattctgataagctgatttttgagcgtctgcagaaagaatttgaggctgctcgagctgctcaaactgaagaaatttcaatagatgatgatgattggaatgatggtttgctagctaccatccgtgagaaggtccatatggaggctgacaggaaggccatggctaaccaagtaaatgttccagcagatcttccatttcaatcaaagactacatataggattagaaataaggttatctattgcttggatggagcgagaattggcatacagtatgagacattctttgctggtgagccttgtgaaatatttcattgtgttttggaaagcaagtcattcctggaaaagatgactgtgattgagcacaccttacctttctttctgcccatacgcgaattggaaagtgatctcctgtcatctaatgccattaaatttattgatcaccttgaagaaattttacaggcttatattgacaggagagaacaggttcggcttatcaaggagctctatgggaaccaaattggcgaactgttccacagtcttccttacaatgtgatagagtttgtcttggaggattttgagtgcaagattacagtcagtatccgatattcagatctacttctgaccctgccgagtcaggcaagggtcttggcttggccacttcgctcgtccaagagaatatccacacgaagcagcagtgcgtcagctgcacagccggtaccatttcacctttcatacgctgaggaagcactcaagacattgtgtctaccagaagcttacgcggacattgtgctggacctaccccatgctctcaagaggattctcacctctcaggacagtgactga

SEQ ID NO: 257 - protein, 341 aa, Setaria italica
MGSRTSPPHDYLHMHVEQLRRRHQSLSELTFARDEDAKLETTRARLSNILKRHEDLKERLSRDSDKLIFERLQKEFEAARAAQTEEISIDDDDWNDGLLATIREKVHMEADRKAMANQVNVPADLPFQSKTTYRIRNKVIYCLDGARIGIQYETFFAGEPCEIFHCVLESKSFLEKMTVIEHTLPFFLPIRELESDLLSSNAIKFIDHLEEILQAYIDRREQVRLIKELYGNQIGELFHSLPYNVIEFVLEDFECKITVSIRYSDLLLTLPSQARVLAWPLRSSKRISTRSSSASAAQPVPFHLSYAEEALKTLCLPEAYADIVLDLPHALKRILTSQDSD

SEQ ID NO: 258 - DNA, 924 bp, Setaria italica
atgaagatgcaaaacttgagaccacaagggcaagtgtcaaacatcctcaaaaggcatgaagacttgaaagagcgcctttcacgggattctgataagctgatttttgagcgtctgcagaaagaatttgaggctgctcgagctgctcaaactgaagaaatttcaatagatgatgatgattggaatgatggtttgctagctaccatccgtgagaaggtccatatggaggctgacaggaaggccatggctaaccaagtaaatgttccagcagatcttccatttcaatcaaagactacatataggattagaaataaggttatctattgcttggatggagcgagaattggcatacagtatgagacattctttgctggtgagccttgtgaaatatttcattgtgttttggaaagcaagtcattcctggaaaagatgactgtgattgagcacaccttacctttctttctgcccatacgcgaattggaaagtgatctcctgtcatctaatgccattaaatttattgatcaccttgaagaaattttacaggcttatattgacaggagagaacaggttcggcttatcaaggagctctatgggaaccaaattggcgaactgttccacagtcttccttacaatgtgatagagtttgtcttggaggattttgagtgcaagattacagtcagtatccgatattcagatctacttctgaccctgccgagtcaggcaagggtcttggcttggccacttcgctcgtccaagagaatatccacacgaagcagcagtgcgtcagctgcacagccggtaccatttcacctttcatacgctgaggaagcactcaagacattgtgtctaccagaagcttacgcggacattgtgctggacctaccccatgctctcaagaggattctcacctctcaggacagtgactga

SEQ ID NO: 259 - protein, 307 aa, Setaria italica
MKMQNLRPQGQVSNILKRHEDLKERLSRDSDKLIFERLQKEFEAARAAQTEEISIDDDDWNDGLLATIREKVHMEADRKAMANQVNVPADLPFQSKTTYRIRNKVIYCLDGARIGIQYETFFAGEPCEIFHCVLESKSFLEKMTVIEHTLPFFLPIRELESDLLSSNAIKFIDHLEEILQAYIDRREQVRLIKELYGNQIGELFHSLPYNVIEFVLEDFECKITVSIRYSDLLLTLPSQARVLAWPLRSSKRISTRSSSASAAQPVPFHLSYAEEALKTLCLPEAYADIVLDLPHALKRILTSQDSD

SEQ ID NO: 260 - DNA, 1730 bp, Sorghum bicolor
gggaggagaacgccgccggagccaccttgccggaccggaaacagcgaatcggatcgcatcaaagctgcctagtcatcccccccctccccgaccggaactcgctgcaatccgtcgcaggtcgccggggccgtggacgccgggccgccgtcgccaaacggaagacgctgcctcctagccgctgccgcagggaggtaccgtctcggggccgcaactgcaggggcgaattgtcgctcagcaggcggtcagattcatggcgcccacggagacttatgcaagggacgacgatgcaaaacttgaggccacacgtgcaaggctgtcaaacatcctcagaaggcatgaagatctgaaagagcgcctttcacgggattctgataagctgatttttgagcgcctacagaaagaatttgaggctgcacgagctgctcaaaccgaagatggtttggatccttcagttagccagattttatctgtagatcacagaattgtctacacattcttttggcattctgtagagatttcaatagatgatgatgagtggaatgatggtttactggcaaccatccgtgagaaggtccatatggaggctgataggaaggccatggccaaccaagtaaatgttccagcagatcttccatttcaatcaaggactacatataggattagaaataaggtagcatttgctccccagatcattgccttttctaatatagttttgtatatggttagcatgtctgctgagattggtgctgctttggttatctattgcttggatggagcgaggattggcatacagtatgagacattctttgctggcgagccttgtgaaatttttcattgtgttttggaaagcaagtcattcctggaaaagatgattgtgattgaacacaccttgcctttctttctgcccatacgtgaattagaaagtgatctcttgtcatctaattccattaaattcattgatcatcttgaagaaattttacaggcttatattgacaggagagagcagcttctaccatttggccaatcaactgttgaggcatttatagctgtaaagatgggtcaagtgtggaaggttcgtcttatcaaggagctctacgggaaccaaattggcgagctgttccatagtcttccttacaatatgatcgagtttgtattggaggattttgagtgcaaggttacaatcagtatccgatattcggatctactgcagaccctgccgagtcaagcaagggtcttggcttggccacttcgctcggccaagagaatatccacaagaagcagcagtgcatcagctgcgcaaccagtaccttttcacctttcatacgccgaggaagcactcaagaccttgtgtctaccagaagcatacgcagacattgtgctggagctacctcatgctctgaagaggattttctcctctcgggacagtgactgaatcctgacctcaaggtctctgtaagattcacatctcaatcttgggaggtgggacaggtgtttgaagatatattgttgagaatcttgtggtagtatagcctgcagttgtggactgcaattcctgtgaaagcaaggcagacacatttgctccgttgaccgctctaaggtccagcccgttgcgaaaaaattttcgagctactgtagcattttcgtttttatgtggcaattattgttcaattatggactaactggactcaaaagattcgtcttgttaattacagataaattgtgtaattagt

SEQ ID NO: 261 - protein, 393 aa, Sorghum bicolor
MAPTETYARDDDAKLEATRARLSNILRRHEDLKERLSRDSDKLIFERLQKEFEAARAAQTEDGLDPSVSQILSVDHRIVYTFFWHSVEISIDDDEWNDGLLATIREKVHMEADRKAMANQVNVPADLPFQSRTTYRIRNKVAFAPQIIAFSNIVLYMVSMSAEIGAALVIYCLDGARIGIQYETFFAGEPCEIFHCVLESKSFLEKMIVIEHTLPFFLPIRELESDLLSSNSIKFIDHLEEILQAYIDRREQLLPFGQSTVEAFIAVKMGQVWKVRLIKELYGNQIGELFHSLPYNMIEFVLEDFECKVTISIRYSDLLQTLPSQARVLAWPLRSAKRISTRSSSASAAQPVPFHLSYAEEALKTLCLPEAYADIVLELPHALKRIFSSRDSD

SEQ ID NO: 262 - DNA, 1728 bp, Sorghum bicolor
gggaggagaacgccgccggagccaccttgccggaccggaaacagcgaatcggatcgcatcaaagctgcctagtcatcccccccctccccgaccggaactcgctgcaatccgtcgcaggtcgccggggccgtggacgccgggccgccgtcgccaaacggaagacgctgcctcctagccgctgccgcagggaggtaccgtctcggggccgcaactgcaggggcgaattgtcgctcagcaggcggtcagattcatggcgcccacggagacttatgcaagggacgacgatgcaaaacttgaggccacacgtgcaaggctgtcaaacatcctcagaaggcatgaagatctgaaagagcgcctttcacgggattctgataagctgatttttgagcgcctacagaaagaatttgaggctgcacgagctgctcaaaccgaagatggtttggatccttcagttagccagattttatctgtagatcacagaattgtctacacattcttttggcattctgtagagatttcaatagatgatgatgagtggaatgatggtttactggcaaccatccgtgagaaggtccatatggaggctgataggaaggccatggccaaccaagtaaatgttccagcagatcttccatttcaatcaaggactacatataggattagaaataaggtagcatttgctccccagatcattgccttttctaatatagttttgtatatggttagcatgtctgctgagattggtgctgctttggttatctattgcttggatggagcgaggattggcatacagtatgagacattctttgctggcgagccttgtgaaatttttcattgtgttttggaaagcaagtcattcctggaaaagatgattgtgattgaacacaccttgcctttctttctgcccatacgtgaattagaaagtgatctcttgtcatctaattccattaaattcattgatcatcttgaagaaattttacaggcttatattgacaggagagagcagcttctaccatttggccaatcaactgttgaggcatttatagctgtaaagatgggtcaagtgtggaaggttcgtcttatcaaggagctctacgggaaccaaattggcgagctgttccatagtcttccttacaatatgatcgagtttgtattggaggattttgagtggttacaatcagtatccgatattcggatctactgcagaccctgccgagtcaagcaagggtcttggcttggccacttcgctcggccaagagaatatccacaagaagcagcagtgcatcagctgcgcaaccagtaccttttcacctttcatacgccgaggaagcactcaagaccttgtgtctaccagaagcatacgcagacattgtgctggagctacctcatgctctgaagaggattttctcctctcgggacagtgactgaatcctgacctcaaggtctctgtaagattcacatctcaatcttgggaggtgggacaggtgtttgaagatatattgttgagaatcttgtggtagtatagcctgcagttgtggactgcaattcctgtgaaagcaaggcagacacatttgctccgttgaccgctctaaggtccagcccgttgcgaaaaaattttcgagctactgtagcattttcgtttttatgtggcaattattgttcaattatggactaactggactcaaaagattcgtcttgttaattacagataaattgtgtaattagtta

SEQ ID NO: 263 - DNA, 226 bp, Sorghum bicolor
  misc_feature (19)..(19): n is a, c, g, or t
  misc_feature (63)..(63): n is a, c, g, or t
  misc_feature (80)..(80): n is a, c, g, or t
  misc_feature (82)..(82): n is a, c, g, or t
  misc_feature (93)..(93): n is a, c, g, or t
  misc_feature (100)..(100): n is a, c, g, or t
  misc_feature (141)..(141): n is a, c, g, or t
  misc_feature (169)..(169): n is a, c, g, or t
  misc_feature (174)..(174): n is a, c, g, or t
  misc_feature (205)..(205): n is a, c, g, or t
mattyardddakatrarsnrrhdkrsrdsdkrkaaraatdgdsvssvdhrvytwhsvsdddwndgatrkvhmadrkamanvnvadsrttyrrnkvaaasnvymvsmsagaavycdgargytagchcvskskmvhtrsdssnskdhaydrrgstvaavkmgvwkvrkygnghsynmvdwsvsdrycrcrvkgswgharryaavhrnythtrkhsrcvykhttcwsym

SEQ ID NO: 264 - DNA, 996 bp, Vitis vinifera
atgcagcatcatgaaaagcttgaaggaaggccaaatatgacaatgggagaagtgaattttatacaagcggaagatgtgcgattagagactacacgagctagattttcaaatgtgattaaaaggcatgggcagttaattgagcgtctttctagggattctgacaagatgatttttgagcgtctacaaaaggaatttgatgccgctcgagcttctcaaactgaagagattcttttagatggcgaacagtggaatgatgggctattagctacaataagggagcgggttcatatggaggcagacagaaaggcaatgccaggggactcaagcatgctaccggatcctcttttccatggaaaaactacttataaagttgggaataaggtaatttgttgtttggaaggggcaaggattggcatacaatatgagacatcttttgctggagaaccttgtgaactgtaccactgtgtgcttgagagtaaatcatttcttgaaaagatgaccgtcatcgagcatacagtaccgttctttctaccaatacgagaagcagaaaatgatcttctgtcttccaatgcaatgaaatttatagatcatgttggagaacttctgcaagcttatgtggatagacgggaacaggttcgccttattaaggagttatatgggaatcaaattgaagagctttatcatagtcttccctaccacatgattgaatttgcactggatgattctgattgcaagataacagttagtcttagatatgcggatctcctctctgtacttccaacccgaattagagtcctagcctggccaatgcagccaagcaagaaaatcataacaagcacagggacaatcggtagaaaggggaactctgttccagctcgtctgtcttacgcagaggatgccttgcgaacaatgagcttaccagaagcatatgcagagattgtgttgaacctgccacgggttctccagcaaaactttcagcatagaggctcagcttag

SEQ ID NO: 265 - protein, 331 aa, Vitis vinifera
MQHHEKLEGRPNMTMGEVNFIQAEDVRLETTRARFSNVIKRHGQLIERLSRDSDKMIFERLQKEFDAARASQTEEILLDGEQWNDGLLATIRERVHMEADRKAMPGDSSMLPDPLFHGKTTYKVGNKVICCLEGARIGIQYETSFAGEPCELYHCVLESKSFLEKMTVIEHTVPFFLPIREAENDLLSSNAMKFIDHVGELLQAYVDRREQVRLIKELYGNQIEELYHSLPYHMIEFALDDSDCKITVSLRYADLLSVLPTRIRVLAWPMQPSKKIITSTGTIGRKGNSVPARLSYAEDALRTMSLPEAYAEIVLNLPRVLQQNFQHRGSA

SEQ ID NO: 266 - DNA, 1319 bp, Zea mays
ctcactgagcactttcatgctttgtaaaactactattctacttcatatttttgtttttactttagggattctgataagctcatttttgagcgcctacagaaagaatttgaggctgcacgggctgctcaaaccgaagagatatcaataaatgatgatgagtggaatgatggtttactggcaaccatccgtgagaagaccaggttcatatggaggctgataggaaggccatgtccaaccaagtaaatgttccagcagatctttcatttcaatcaaggactacatataggattagaaataaggttatatattgcttggatggagctaggattggcatacagtatgagacattctttgctggagagccttgtgaaatttttcattgtgttttggaaagcaagtcattcctggaaaagatgattatgattgaacacaccttacctttctttctgcctgtacgtgaattagaaagtgatctgttgtcatctaattcaattaaattcattgatcatcttgaagaaattttacaggcttatattgacaggagagagcaggttcgtcttatcaaggagctctacgggaaccaaattggcgagctgttccatagtcttccttataatatgatagagtttgtattggaggattttgagtgcaaggttacaatcagtatccgatattcggatctactgcagaccctgccgagtcaggcaagggtcttggcttggccacttcgctcggccaagaaaatatctacaagaagcagcagtgcatcagctgcgcaaccagtaccctttcacctttcatatgccgaggaagcactcaaaaccttgtgtctaccagaagcatacgcagacattgtgctggagctaccccatgctttgaagaggattttatcctctcgggacagtgactaaatcgtgacctcaagatgtccagttttgttgtgcataagattcacatctcaatcgtggggcatgtttttgaagatattgttcagaatcttgtggtagtatagcctgcagttgtggactgcaattcctgtgaaagcaaggcagacatttgcgtgggccgctcgaaatattccggctacagttcctgttaaaagaatcaaaatcctaggaaggccttatggtcgaggcataatcttgccaactgctgtccttgtccttgatgtgtgctccttttttttctccactctggctatgtttgtttccttttagaattatactagcgcgttacgcgcgcctgcacgcgcgtgttgacaaacctattttatttcaaatatcaagtatctaagaagacatgctaaaatttcaacaata

SEQ ID NO: 267 - protein, 234 aa, Zea mays
MEADRKAMSNQVNVPADLSFQSRTTYRIRNKVIYCLDGARIGIQYETFFAGEPCEIFHCVLESKSFLEKMIMIEHTLPFFLPVRELESDLLSSNSIKFIDHLEEILQAYIDRREQVRLIKELYGNQIGELFHSLPYNMIEFVLEDFECKVTISIRYSDLLQTLPSQARVLAWPLRSAKKISTRSSSASAAQPVPFHLSYAEEALKTLCLPEAYADIVLELPHALKRILSSRDSD

SEQ ID NO: 268 - DNA, 1452 bp, Zea mays
ctcactgagcactttcatgctttgtaaaactactattctacttcatatttttgtttttactttagggattctgataagctcatttttgagcgcctacagaaagaatttgaggctgcacgggctgctcaaaccgaagagatatcaataaatgatgatgagtggaatgatggtttactggcaaccatccgtgagaagaccaggttcatatggaggctgataggaaggccatgtccaaccaagtaaatgttccagcagatctttcatttcaatcaaggactacatataggattagaaataaggttatatattgcttggatggagctaggattggcatacagtatgagacattctttgctggagagccttgtgaaatttttcattgtgttttggaaagcaagtcattcctggaaaagatgattatgattgaacacaccttacctttctttctgcctgtacgtgaattagaaagtgatctgttgtcatctaattcaattaaattcattgatcatcttgaagaaattttacaggcttatattgacaggagagagcaggttcgtcttatcaaggagctctacgggaaccaaattggcgagctgttccatagtcttccttataatatgatagagtttgtattggaggattttgagtggtaaggataatatttaattactgctaatgcttggattgcatcaataagttctgttttgttgctagtacactccctcatagaatatgtacacctagtgcagccttctatttttgttatcttgcagcgtgcatgctgaatatcgcatactgattttaagctgctaatatgcataagtagcttgttgcacattttgtagagattgatctgtttgccacttataagcagcaaggttacaatcagtatccgatattcggatctactgcagaccctgccgagtcaggcaagggtcttggcttggccacttcgctcggccaagaaaatatctacaagaagcagcagtgcatcagctgcgcaaccagtaccctttcacctttcatatgccgaggaagcactcaaaaccttgtgtctaccagaaggtgcttcctgtcaccttggcttacagcatacatggctttgtgctgaattgatctgtttctccctgttctgtgtttcagcatacgcagacattgtgctggagctaccccatgctttgaagaggattttatcctctcgggacagtgactaaatcgtgacctcaagatgtccagttttgttgtgcataagattcacatctcaatcgtggggcatgtttttgaagatattgttcagaatcttgtggtagtatagcctgcagttgtggactgcaattcctgtgaaagcaaggcagacatttgcgtgggccgctcgaaatattccggctacagttcctgttaaaagaatcaaaatcctaggaaggccttatggtcgaggcataatcttgccaa

SEQ ID NO: 269 - protein, 148 aa, Zea mays
MEADRKAMSNQVNVPADLSFQSRTTYRIRNKVIYCLDGARIGIQYETFFAGEPCEIFHCVLESKSFLEKMIMIEHTLPFFLPVRELESDLLSSNSIKFIDHLEEILQAYIDRREQVRLIKELYGNQIGELFHSLPYNMIEFVLEDFEW

SEQ ID NO: 270 - DNA, 1009 bp, Zea mays
ttgcttatctctaggatatgcttcttgccctccaagtcatgtactcctatatattctccctagaggcttaatgcaatacatcccacacattatacacattctctccttcaggttctggtccagtatctgaaattgcaaccctgagtattataaaagaattgatatatgagtcatgacatttttctttttaatgagtgtgccttctatcattggccaatcaattgttgaggcacttgtagctttaaagattggagctaagggtcaaatgtggaatctggagacagatgggtcatacagtctttgatggtacatcgctaattatagtttttatttcatgttcaaggttcgtcttatcaaggagctctacgggaaccaaattggcgagctgttccatagtcttccttataatatgatagagtttgtattggaggattttgagtgcaaggttacaatcagtatccgatattcggatctactgcagaccctgccgagtcaggcaagggtcttggcttggccacttcgctcggccaagaaaatatctacaagaagcagcagtgcatcagctgcgcaaccagtaccctttcacctttcatatgccgaggaagcactcaaaaccttgtgtctaccagaagcatacgcagacattgtgctggagctaccccatgctttgaagaggattttatcctctcgggacagtgactaaatcgtgacctcaagatgtccagttttgttgtgcataagattcacatctcaatcgtggggcatgtttttgaagatattgttcagaatcttgtggtagtatagcctgcagttgtggactgcaattcctgtgaaagcaaggcagacatttgcgtgggccgctcgaaatattccggctacagttcctgttaaaagaatcaaaatcctaggaaggccttatggtcgaggcataatcttgccaactgctgtccttgtccttgatgtgtgctccttttttttctccactctggctatgtttgtttccttttag

SEQ ID NO: 271 - protein, 122 aa, Zea mays
MFKVRLIKELYGNQIGELFHSLPYNMIEFVLEDFECKVTISIRYSDLLQTLPSQARVLAWPLRSAKKISTRSSSASAAQPVPFHLSYAEEALKTLCLPEAYADIVLELPHALKRILSSRDSD

SEQ ID NO: 272 - DNA, 974 bp, Glycine max
gcggccgcttctagctagctagggtttgggtagtgagtgtaataaagttgcaaagtttttggttaggttacgttttgaccttattattatagttcaaagggaaacattaattaaaggggattatgaaggcgaagaaaactcagagggattgaggatcttactgggtgaattgagctgcttagctatggatcccacagttctacccatcaataagtgcttttgtggtagtcttgtggcttccatatctggggagcttcatttgcctttatagtattaaccttcttccctctctgttttcttcgccacccttctcttcttttctctcataataatttaaatttgttatagactctaaactttaaatgttttttttgaagtttttccgtttttctcttttgccatgatcccgttcttgctgtggagtaaccttgtccgaggtatgtgcatgattagatccatacttaatttgtgtgcatcacgaaggtgaggttgaaatgaactttgcttttttgaccttttaggaaagttcttttgttgcagtaatcaattttaattagttttaattgacactattacttttattgtcatctttgttagttttattgttgaattgagtgcatatttcctaggaaattctcttacctaacattttttatacagatctatgctcttggctcttgcccttactcttggccttgtgttggttatttgtctacatatttattgactggtcgatgagacatgtcacaattcttgggcttatttgttggtctaataaaaggagtgcttattgaaagatcaagacggagattcggttttatataaataaactaaagatgacatattagtgtgttgatgtctcttcaggataatttttgtttgaaataatatggtaatgtcttgtctaaatttgtgtacataattcttactgattttttggattgttggatttttataaacaaatctgcggccgc

SEQ ID NO: 273 - DNA, 974 bp, Glycine max
gcggccgcttctagctagctagggtttgggtagtgagtgtaataaagttgcaaagtttttggttaggttacgttttgaccttattattatagttcaaagggaaacattaattaaaggggattatgaagtagaaatggatattgagcaattgaggatcttactgggtgaattgagctgcttagctatggatcccacagttctacccatcaataagtgcttttgtggtagtcttgtggcttccatatctggggagcttcatttgcctttatagtattaaccttctttgctcataatccatttctacacccttctcttcttttctctcataataatttaaatttgttatagactctaaactttaaatgttttttttgaagtttttccgtttttctcttttgccatgatcccgttcttgctgtggagtaaccttgtccgaggtatgtgcatgattagatccatacttaatttgtgtgcatcacgaaggtgaggttgaaatgaactttgcttttttgaccttttaggaaagttcttttgttgcagtaatcaattttaattagttttaattgacactattacttttattgtcatctttgttagttttattgttgaattgagtgcatatttcctaggaaattctcttacctaacattttttatacagatctatgctcttggctcttgcccttactcttggccttgtgttggttatttgtctacatatttattgactggtcgatgagacatgtcacaattcttgggcttatttgttggtctaataaaaggagtgcttattgaaagatcaagacggagattcggttttatataaataaactaaagatgacatattagtgtgttgatgtctcttcaggataatttttgtttgaaataatatggtaatgtcttgtctaaatttgtgtacataattcttactgattttttggattgttggatttttataaacaaatctgcggccgc

SEQ ID NO: 274 - DNA, 974 bp, Glycine max
gcggccgcttctagctagctagggtttgggtagtgagtgtaataaagttgcaaagtttttggttaggttacgttttgaccttattattatagttcaaagggaaacattaattaaaggggattatgaagacgggttaatttagggctggttgaggatcttactgggtgaattgagctgcttagctatggatcccacagttctacccatcaataagtgcttttgtggtagtcttgtggcttccatatctggggagcttcatttgcctttatagtattaaccttctccagcccataattaacccgtcacccttctcttcttttctctcataataatttaaatttgttatagactctaaactttaaatgttttttttgaagtttttccgtttttctcttttgccatgatcccgttcttgctgtggagtaaccttgtccgaggtatgtgcatgattagatccatacttaatttgtgtgcatcacgaaggtgaggttgaaatgaactttgcttttttgaccttttaggaaagttcttttgttgcagtaatcaattttaattagttttaattgacactattacttttattgtcatctttgttagttttattgttgaattgagtgcatatttcctaggaaattctcttacctaacattttttatacagatctatgctcttggctcttgcccttactcttggccttgtgttggttatttgtctacatatttattgactggtcgatgagacatgtcacaattcttgggcttatttgttggtctaataaaaggagtgcttattgaaagatcaagacggagattcggttttatataaataaactaaagatgacatattagtgtgttgatgtctcttcaggataatttttgtttgaaataatatggtaatgtcttgtctaaatttgtgtacataattcttactgattttttggattgttggatttttataaacaaatctgcggccgc

SEQ ID NO: 275 - DNA, 21 bp, Arabidopsis thaliana
tccaatataaatttaacacct

SEQ ID NO: 276 - DNA, 959 bp, Glycine max
ttctagctagctagggtttgggtagtgagtgtaataaagttgcaaagtttttggttaggttacgttttgaccttattattatagttcaaagggaaacattaattaaaggggattatgaagaggtgttaaataaatattggttgaggatcttactgggtgaattgagctgcttagctatggatcccacagttctacccatcaataagtgcttttgtggtagtcttgtggcttccatatctggggagcttcatttgcctttatagtattaaccttctccaatataaatttaacacctcacccttctcttcttttctctcataataatttaaatttgttatagactctaaactttaaatgttttttttgaagtttttccgtttttctcttttgccatgatcccgttcttgctgtggagtaaccttgtccgaggtatgtgcatgattagatccatacttaatttgtgtgcatcacgaaggtgaggttgaaatgaactttgcttttttgaccttttaggaaagttcttttgttgcagtaatcaattttaattagttttaattgacactattacttttattgtcatctttgttagttttattgttgaattgagtgcatatttcctaggaaattctcttacctaacattttttatacagatctatgctcttggctcttgcccttactcttggccttgtgttggttatttgtctacatatttattgactggtcgatgagacatgtcacaattcttgggcttatttgttggtctaataaaaggagtgcttattgaaagatcaagacggagattcggttttatataaataaactaaagatgacatattagtgtgttgatgtctcttcaggataatttttgtttgaaataatatggtaatgtcttgtctaaatttgtgtacataattcttactgattttttggattgttggatttttataaacaaatctg

SEQ ID NO: 277 - DNA, 21 bp, Arabidopsis thaliana
taaacaatcacaacaccaccc

SEQ ID NO: 278 - DNA, 1075 bp, Glycine max
gtgatctttataaataacccctcgctaacccaatcttcacccgttcaccacatatagtgtgggtaggggttagcttcgcgattcttatttctctctttaactctctctctctctcgtcctcgcggatggagagagagaaagtaagagagaaagagcggtggttggtggttttggtttggtgaagttcgattcgatgcgatgcgattgcgttggggattttgattctctctctctcactgtgcggtctctaattaaacaatcacaacaccacccccggttttcgcgcggaatggaggaacggtcgccggcgccgaattggcggtggagttgtgattgattaatcggaggccgcggtgaacctttgcctcgttttccgctcagatctcatctccgagattctaccaccagtattttttaaatttattttaatctctgcttatcagatccgaaacgcttctagatttaagtttatcgtctctatgcagaaagtgtgatttatgcggtagatcccgatgcatggaatctacatctaagagaaacagttttagttaaaaagcttctgatgtgctttttccttgtttggatttttacttgacctgcttcctttcattgattaataatcaagctgaaatttttgatatttgagaactgaaataaataatcttggatttattacaataatgaatttactgtatcggtataggttaagctaattgaggtgattgcgattcgattgggaaaaaaaaaaaacattttttaggttttctgatggtttttgagccttggttgaattgaattgcatgccacggttgcaagtgttttatgtgatgcattccattgcgatgcttgtgcttattctggttcgagctattttatattgtttgatattgcttttagaacagaaggcttcaagtctatgaagcatttgtaagtgaattgtgtagcaggaattgatgacctgtttggggcatgatttgagtatctggctctctgtgtaactagcttctagacatagaaacccaagttaagacttgaggatggcttcatattgcatactactatgtcaaagtaattg

SEQ ID NO: 279 - DNA, 21 bp, Arabidopsis thaliana
tatacaacctacgacacactt

SEQ ID NO: 280 - DNA, 309 bp, Arabidopsis thaliana
aagggggatccactaggacagtttgcttatgtcggatccataatatatttgacaagatactttgtttttcgatagatcttgatctgacgatggaagaagtgtgtcgtaggttgtatacatgagttgagcagggtaaagaaaagctgctaagctatggatcccataagccctaatccttgtaaagtaaaaaaggatttggttatatggattgcatatctcaggagctttaacttgccctttaatggcttttactcttctatacaacctacgacacacttcatcccgggtcaaagggtatcgatgactagg

SEQ ID NO: 281 - DNA, 21 bp, Arabidopsis thaliana
tagcccctctccttgtaccag

SEQ ID NO: 282 - DNA, 309 bp, Arabidopsis thaliana
aagggggatccactaggacagtttgcttatgtcggatccataatatatttgacaagatactttgtttttcgatagatcttgatctgacgatggaagctggtacaaggagaggggctacatgagttgagcagggtaaagaaaagctgctaagctatggatcccataagccctaatccttgtaaagtaaaaaaggatttggttatatggattgcatatctcaggagctttaacttgccctttaatggcttttactcttctagcccctctccttgtaccagcatcccgggtcaaagggtatcgatgactagg

SEQ ID NO: 283 - DNA, 21 bp, Arabidopsis thaliana
taaccttatacaacctacgac

SEQ ID NO: 284 - DNA, 309 bp, Arabidopsis thaliana
aagggggatccactaggacagtttgcttatgtcggatccataatatatttgacaagatactttgtttttcgatagatcttgatctgacgatggaaggtcgtaggttgtataaggttacatgagttgagcagggtaaagaaaagctgctaagctatggatcccataagccctaatccttgtaaagtaaaaaaggatttggttatatggattgcatatctcaggagctttaacttgccctttaatggcttttactcttctaaccttatacaacctacgaccatcccgggtcaaagggtatcgatgactagg

SEQ ID NO: 285 - DNA, 21 bp, Arabidopsis thaliana
tccaccttcaccgcctctcct

SEQ ID NO: 286 - DNA, 309 bp, Arabidopsis thaliana
aagggggatccactaggacagtttgcttatgtcggatccataatatatttgacaagatactttgtttttcgatagatcttgatctgacgatggaagaggagaggcggtgaaggtggacatgagttgagcagggtaaagaaaagctgctaagctatggatcccataagccctaatccttgtaaagtaaaaaaggatttggttatatggattgcatatctcaggagctttaacttgccctttaatggcttttactcttctccaccttcaccgcctctcctcatcccgggtcaaagggtatcgatgactagg

SEQ ID NO: 287 - DNA, 21 bp, Arabidopsis thaliana
tctccaccttcaccgcctctc

SEQ ID NO: 288 - DNA, 309 bp, Arabidopsis thaliana
aagggggatccactaggacagtttgcttatgtcggatccataatatatttgacaagatactttgtttttcgatagatcttgatctgacgatggaaggagaggcggtgaaggtggagacatgagttgagcagggtaaagaaaagctgctaagctatggatcccataagccctaatccttgtaaagtaaaaaaggatttggttatatggattgcatatctcaggagctttaacttgccctttaatggcttttactcttctctccaccttcaccgcctctccatcccgggtcaaagggtatcgatgactagg
